(19) United States
(12) Patent Application Publication
(10) Pub. No.: US 2021/0340508 A1
(43) Pub. Date: Nov. 4, 2021

(54) Genome Editing by Directed Non-Homologous DNA Insertion Using a Retroviral Integrase-Cas9 Fusion Protein

(71) Applicant: UNIVERSITY OF ROCHESTER, Rochester, NY (US)

(72) Inventor: Douglas Matthew Anderson, Pittsford, NY (US)

(21) Appl. No.: 17/366,419

(22) Filed: Jul. 2, 2021

Related U.S. Application Data
(63) Continuation of application No. 17/287,184, filed on Apr. 21, 2021.
(60) Provisional application No. 62/748,703, filed on Oct. 22, 2018.

(51) Int. Cl. C12N 9/12; C12N 9/22; C12N 15/11

(52) U.S. Cl. CPC C12N 9/12; C12N 9/22; C12N 2310/20; C07K 2319/09; C12N 15/11

(57) ABSTRACT

The present invention provides proteins, nucleic acids, systems and methods for editing genomic material.

### CROSS-REFERENCE TO RELATED APPLICATIONS

[0001] The present application claims priority to U.S. Provisional Application Ser. No. 62/748,703, filed on Oct. 22, 2018, which is incorporated by reference herein in its entirety.

### BACKGROUND OF THE INVENTION

[0002] CRISPR-Cas9 has significantly advanced our ability to rapidly alter mammalian genomes for basic research and clinical applications. CRISPR-Cas9 uses a guide-RNA to direct Cas9 to specific DNA target sequences, where it induces double-strand DNA cleavage and triggers cellular repair pathways to introduce frame-shift mutations or insert donor sequences through Homology Directed Repair (HDR). Despite these significant advances, the targeted delivery of large DNA sequences for genome editing using CRISPR-Cas9 mediated HDR remains inefficient, requires donor templates containing significant regions of flanking homology and induces the p53 DNA damage pathway (Byrne et al., 2015, NAR 43:e21; Happaniemi et al., 2018, Nat Med 24:927-30; Ihry et al., 2018, Nat Med 24:939-46). Together, these significantly limit the efficiency of CRISPR-Cas9 genome editing. Accordingly, there exists a need for improved integrated genome editing.

[0003] In contrast, the lentiviral enzyme Integrase (IN) is both necessary and sufficient to catalyze the insertion of large lentiviral genomes into host cellular DNA, through a process which does not require target sequence homology. IN-mediated insertion of lentiviral DNA occurs with little DNA target sequence specificity, due in part to its C-terminal domain which binds non-specifically to DNA (Lutzke & Plasterk 1998, J Virol 72:4841-48).

[0004] Current limitations with gene therapy technologies have prevented the treatment of most human monogenetic diseases. CRISPR-Cas9 gene editing has been a recent focus for the development of therapeutic approaches to correct deleterious mutations mammalian genomes. This remains a significant challenge due to the numerous patient-specific mutations within the human genome that can give rise to diseases and disorders. CRISPR guide-RNAs designed to target exon-intron boundaries can allow for exon-skipping strategies to target groups of these mutations, however, the efficacy of these strategies remain to be tested and are not applicable to all patients.

[0005] Transgenic expression of many genes can both prevent and reverse disease outcomes in animal models, however the large size of some genes greatly exceeds the size limit of traditional gene editing approaches, such as CRISPR-Cas9 or traditional viral gene therapy approaches, such as AAV (˜4.9 kb limit), preventing its use for human gene therapy. Approaches using smaller engineered genes delivered by AAV are currently in clinical trials, however it remains to be determined if these strategies offer long term restoration and are only applicable to patients with specific mutations.

[0006] In contrast, lentiviral vectors are capable of delivering large gene and allow for permanent correction by integrating into host genomes. However, the current random nature of lentiviral integration has the potential to cause off-target mutations and disease, which has prevented their use for clinical applications (Milone et al., 2018, Leukemia 23:1529-41). Lentiviral sequences are inserted into host genomes by the virus-encoded enzyme Integrase (IN), which utilizes a non-specific DNA binding domain required for genome integration (Andrake et al., 2015, Annu Rev Virol 2:241-64).

[0007] Accordingly, there exists a need for improved editing genomic material. The present invention meets this need.

### SUMMARY OF THE INVENTION

[0008] In one aspect, the invention provides a fusion protein. In one embodiment, the fusion protein comprises a retroviral integrase (IN), or a fragment thereof having a first amino acid sequence; a CRISPR-associated (Cas) protein having a second amino acid sequence; and a nuclear localization signal (NLS) having a third amino acid sequence.

[0009] In one embodiment, the retroviral IN is selected from the group consisting of human immunodeficiency virus (HIV) IN, Rous sarcoma virus (RSV) IN, Mouse mammary tumor virus (MMTV) IN, Moloney murine leukemia virus (MoLV) IN, bovine leukemia virus (BLV) IN, Human T-lymphotropic virus (HTLV) IN, avian sarcoma leukosis virus (ASLV) IN, feline leukemia virus (FLV) IN, xenotropic murine leukemia virus-related virus (XMLV) IN, simian immunodeficiency virus (SIV) IN, feline immunodeficiency virus (FIV) IN, equine infectious anemia virus (EIAV) IN, Prototype foamy virus (PFV) IN, simian foamy virus (SFV) IN, human foamy virus (HFV) IN, walleye dermal sarcoma virus (WDSV) IN, and bovine immunodeficiency virus (BIV) IN.

[0010] In one embodiment, the retroviral IN fragment comprises the IN N-terminal domain (NTD), and the IN catalytic core domain (CCD). In one embodiment, the retroviral IN comprises a sequence at least 70% identical to one of SEQ ID NOs:1-40. In one embodiment, the retroviral IN comprises a sequence of one of SEQ ID NOs:1-40.

[0011] In one embodiment, the Cas protein is selected from the group consisting of Cas9, Cas13, and Cpf1. In one embodiment, the Cas protein is catalytically deficient (dCas). In one embodiment, the Cas protein comprises a sequence at least 95% identical to one of SEQ ID NOs:41-46. In one embodiment, the Cas protein comprises a sequence of one of SEQ ID NOs:41-46.

[0012] In one embodiment, the NLS is a retrotransposon NLS. In one embodiment, the retrotransposon NLS is Ty1 or Ty2 NLS. In one embodiment, the NLS is a Ty1-like NLS. In one embodiment, the NLS comprises a sequence at least 70% identical to one of SEQ ID NOs:47-56, 254-257, and 275-887. In one embodiment, the NLS comprises a sequence of one of SEQ ID NOs:47-56, 254-257, and 275-887.

[0013] In one embodiment, the fusion protein comprises a sequence at least 70% identical to one of SEQ ID NOs:57-98. In one embodiment, the fusion protein comprises a sequence of one of SEQ ID NOs:57-98.

[0014] In one aspect, the invention provides a nucleic acid encoding a fusion protein of the invention. In one embodiment, the nucleic acid comprises a sequence at least 70% identical to one of SEQ ID NOs:155-196. In one embodiment, the nucleic acid comprises a sequence selected from SEQ ID NOs:155-196.

[0015] In one aspect, the invention provides a method of editing genetic material. In one embodiment, the method comprises administering to the genetic material: (a) a fusion protein of the invention or a nucleic acid molecule encoding a fusion protein of the invention, (b) a guide nucleic acid comprising a targeting nucleotide sequence complimentary to a target region in the genetic material, and (c) a donor template nucleic acid comprising a U3 sequence, a U5 sequence and a donor template sequence. In one embodiment, the method of editing genetic material is an in vitro method. In one embodiment, the method of editing genetic material is an in vivo method.

[0016] In one aspect, the invention provides a system for editing genetic material. In one embodiment, the system comprises, in one or more vectors, (a) a nucleic acid sequence encoding a fusion protein of the invention, (b) a nucleic acid sequence coding a CRISPR-Cas system guide RNA, and (c) a nucleic acid sequence coding a donor template nucleic acid, wherein the donor template nucleic acid comprises a U3 sequence, a U5 sequence and a donor template sequence. In one embodiment, the fusion protein comprises a retroviral integrase (IN), or a fragment thereof, a CRISPR-associated (Cas) protein, and a nuclear localization signal (NLS). In one embodiment, the nucleic acids are on the same vector. In one embodiment, the nucleic acids are on different vectors.

[0017] In one embodiment, the CRISPR-Cas system guide RNA substantially hybridizes to a target DNA sequence in the gene. In one embodiment, the U3 sequence and U5 sequence are specific to the retroviral IN.

[0018] In aspect, the invention provides a system for delivering genome editing components. In one embodiment, the system comprises: (a) a packaging plasmid comprising sequence encoding a gag-pol polyprotein comprising integrase fused to a catalytically dead Cas (dCas) protein; (b) transfer plasmid comprising a sequence encoding a donor sequence, a 5′LTR and a 3′LTR; and (c) an envelope plasmid comprising a nucleic acid sequence encoding an envelope protein. In one embodiment, the packaging plasmid further comprises a sequence encoding a guide RNA sequence.

[0019] In one embodiment, the system comprises (a) a packaging plasmid comprising sequence encoding a gag-pol polyprotein; (b) transfer plasmid comprising a sequence encoding a donor sequence, a 5′LTR and a 3′LTR; (c) an envelope plasmid comprising a nucleic acid sequence encoding an envelope protein; and (d) a VPR-IN-dCas plasmid comprises a nucleic acid sequence encoding a fusion protein comprising VPR, integrase, and catalytically dead Cas (dCas). In one embodiment, the VPR-IN-dCas plasmid further comprises a sequence encoding a guide RNA sequence.

[0020] In one embodiment, the system comprises (a) a packaging plasmid comprising nucleic acid sequence encoding a gag-pol polyprotein; (b) transfer plasmid comprising a nucleic acid sequence encoding an guide RNA, a fusion protein comprising integrase and a catalytically dead Cas, a 5′LTR and a 3′LTR; and (c)an envelope plasmid comprising a nucleic acid sequence encoding an envelope protein.

### BRIEF DESCRIPTION OF THE DRAWINGS

[0021] The following detailed description of embodiments of the invention will be better understood when read in conjunction with the appended drawings. It should be understood, however, that the invention is not limited to the precise arrangements and instrumentalities of the embodiments shown in the drawings.

[0022] FIG. 1, comprising FIG. 1A through FIG. 1C, depicts experimental results demonstrating enhanced nuclear localization of retroviral Integrase-dCas9 fusion proteins for editing of mammalian genomic DNA. FIG. 1A depicts a schematic of the IN-dCas9 fusion proteins. FIG. 1B depicts the nuclear localization of IN-dCas9 fusion proteins. FIG. 1C depicts experimental results demonstrating the enzymatic activity of INΔC-dCas9 fusion protein to integrate an IRES-mCherry template targeted to the 3′UTRE of EF1-alpha in HEK293 cells.

[0023] FIG. 2, depicts a schematic of the nucleic acid editing technology showing that the fusion of viral Integrase (IN) with CRISPR-dCas9 allows for the integration of large DNA sequences in a target specific manner. This approach allows for the safe and permanent delivery of large gene sequences that normally exceed the limit of non-integrating AAV vectors.

[0024] FIG. 3 depicts the experimental design and experimental results of the GFP reporter cell line used quantify and characterize the fidelity of individual integration events in mammalian cells.

[0025] FIG. 4 depicts a schematic of the CRISPER-Cas9-mediated homology directed repair and the retroviral integrase-mediated random DNA integration.

[0026] FIG. 5 depicts a schematic of the Integrase-Cas genome editing.

[0027] FIG. 6 depicts schematics of the donor vector, generating blunt-ended templates, and generating 3′-processed templates.

[0028] FIG. 7 depicts the experimental design of the co-transfection of the INsrt templates, the IN-dCas9 vectors targeting the amilCP sequence were co-transfected into Cos 7 cells.

[0029] FIG. 8 depicts the experimental design of the paired guide-RNAs specific the 3′UTR of the human EF1-alpha locus to knock-in the IGR-mCherry-2A-puromycin-pA cassette into the human HEK293 cell line and images of mCherry-positive cells 48 hours after transfection.

[0030] FIG. 9 depicts a schematic demonstrating directional editing

[0031] FIG. 10 depicts a schematic demonstrating multiplex genome editing for the generation of floxed alleles.

[0032] FIG. 11, comprising FIG. 11A through FIG. 11C, depicts experimental results demonstrating the efficiency of Ty1 NLS-like Sequences on Nuclear Localization of INΔC-Cas9 fusion proteins. FIG. 11A depicts the detection of INΔC-dCas9 fusion proteins containing a C-terminal classic SV40, Ty1 or Ty2 NLSs expressed in Cos-7 cells using an anti-FLAG antibody. FIG. 11B depicts Ty1 NLS-like sequences isolated from yeast proteins can provide robust nuclear localization (MAK11) or no apparent localizing activity (INO4 and STH1). FIG. 11C depicts sequences of Ty1, Ty2 and Ty1 NLS-like sequences. Ty1 and Ty2 are highly conserved in both length and residue composition. Scale bars=10 μm.

[0033] FIG. 12, comprising FIG. 12A through FIG. 12C, depicts experimental results demonstrating that the Ty1 NLS enhances Cas9 DNA editing in mammalian cells. FIG. 12A depicts a diagram of the px330 CRISPR-Cas9 expression plasmid which encodes an hU6-driven single guide-RNA (sgRNA) and CAG driven Cas9 protein containing an N-terminal 3×FLAG tag, SV40 NLS and C-terminal NPM NLS. The Ty1 NLS was cloned in place of the NPM NLS in px330 (px330-Ty1). FIG. 12B depicts a frame-shift activated luciferase reporter was generated in which an upstream 20 nt target sequence (ts) interrupts the open reading from of a downstream luciferase open reading frame. Frameshifts induced by non-homologous end joining (NHEJ) reframe the downstream reporter and allow for Luciferase expression. FIG. 12C depicts co-expression of the frameshift-responsive luciferase reporter and px330 containing a single guide-RNA specific to the target sequence resulted in a ˜20-fold activation of luciferase activity, relative to a non-targeting sgRNA. Co-expression of px330-Ty1 resulted in a ˜44% enhancement over px330.

[0034] FIG. 13, comprising FIG. 13A through FIG. 13E, depicts genome targeting strategies for editing. Integration of DNA donor sequences can be targeted to different genome locations dependent upon the desired application. FIG. 13A depicts delivery of a DNA donor sequence carrying a gene cassette could be targeted to an intergenic ‘safe harbor’ locus to prevent disruption of neighbor or essential gene expression. FIG. 13B depicts delivery of a DNA donor sequence carrying a gene cassette could be targeted to a non-essential ‘safe harbor’ locus to prevent disruption of neighbor or essential gene expression. FIG. 13C depicts integration of a DNA sequence encoding a splice acceptor sequence (SA) could be delivered to an intron region of a gene (for example, the disease gene locus), which would allow for expression of the integrated sequence and prevent expression of the downstream sequence. FIG. 13D depicts integration of a DNA sequence encoding a splice acceptor sequence (SA) could be delivered to an intron region of a gene (for example, the disease gene locus), which would allow for expression of the integrated sequence and prevent expression of the downstream sequence. FIG. 13E depicts integration of a DNA donor sequence containing and Internal Ribosome Entry Sequence (IRES) into the 3′ UTR could allow for expression without disrupting expression from the endogenous locus.

[0035] FIG. 14 depicts a diagram of the lentiviral lifecycle. Lentivirus, a subclass of retrovirus, are single-stranded RNA viruses which integrate a permanent double-stranded DNA (dsDNA) copy of their proviral genomes into host cellular DNA. Following viral transduction, lentiviral RNA genomes are copied as blunt-ended dsDNA by viral-encoded reverse transcriptase (RT) and inserted into host genomes by Integrase I(IN). Lentiviral genomes are flanked by short (˜20 base pair) sequence motifs at their U3 and U5 termini which are required for proviral genome integration by IN. IN-mediated insertion of retroviral DNA occurs with little DNA target sequence specificity and can integrate into active gene loci, which can disrupt normal gene function and has the potential to cause disease in humans.

[0036] FIG. 15, comprising FIG. 15A through FIG. 15E, depicts genome editing in mammalian cells. Fusion of lentiviral Integrase to dCas9 allows for targeted non-homologous insertion of donor DNA sequences containing short viral termini. FIG. 15A depicts a diagram of a mammalian expression vector encoding a human U6-driven single-guide RNA (sgRNA) and Integrase-dCas9 fusion protein. FIG. 15B depicts a diagram showing a dsDNA Donor template containing an IGR IRES-mCherry-2A-Puromycin (puro) cassette flanked by U3/U5 viral motifs. FIG. 15C depicts a schematic Integrase-Cas9-mediated integration of this donor template into a CMV-eGFP reporter transgene stably expressed in COS-7 cells. FIG. 15D depicts a schematic demonstrating integrase-Cas9-mediated integration of this donor template into a CMV-eGFP reporter transgene stably expressed in COS-7 can result in disruption of eGFP expression while allowing mCherry expression. FIG. 15E depicts experimental results demonstrating loss of eGFP expression and gain of mCherry expression in edited COS-7 cells.

[0037] FIG. 16, comprising FIG. 16A through FIG. 16C, depicts traditional lentiviral gene delivery systems. FIG. 16A depicts a diagram of a lentiviral genome, which encodes viral proteins between flanking long terminal repeats (LTRs). FIG. 16B and FIG. 16C depicts schematics demonstrating that lentiviral genomes have been harnessed as a robust gene delivery tool. Lentiviral particles can be used to package, deliver and stably express donor transgene sequences. For lentiviral vector gene expression systems, viral polyproteins are removed from the viral genome and expressed using separate mammalian expression plasmids. Donor DNA sequences of interest can then be cloned in place of viral polyproteins between the flanking LTR sequences. Co-transfection of these vectors in mammalian packaging cells allows for the formation of lentiviral particles capable of delivering and integrating the encoded donor sequence, however do not require the coding information for Integrase and other viral proteins necessary for subsequent viral propagation. Lentiviral particles are a natural vector for the delivery of both viral proteins (ex. integrase and reverse transcriptase) and dsDNA donor sequences, which contain the necessary viral end sequences required for integrase-mediated insertion into mammalian cells. FIG. 16B depicts the generation of lentiviral vectors. FIG. 16C depicts the transduction of the lentiviral particle which deliver and stably express donor transgene sequences.

[0038] FIG. 17, comprising FIG. 17A through FIG. 17C, depicts targeted lentiviral integration. Existing lentiviral delivery systems can be modified to incorporate editing components for the purpose of targeted lentiviral donor template integration for genome editing in mammalian cells. FIG. 17A depicts one approach in which dCas9 is directly fused to Integrase (or to Integrase lacking its C-terminal non-specific DNA binding domain) within a lentiviral packaging plasmid (ex. psPax2) encoding the gag-pol polyprotein. FIG. 17B depicts that the modified gag-pol polyprotein is translated with other viral components as a polyprotein, loaded with guide-RNA and packaged into lentiviral particles. For this approach, the IN-dCas9 fusion protein retains the sequences necessary for protease cleavage (PR), and thus is cleaved normally from the gag-pol polyprotein during particle maturation. Transduction of mammalian cells results in the delivery of viral proteins, including the IN-dCas9 fusion protein, sgRNA, and lentiviral donor sequence. FIG. 17C depicts that upon lentiviral transduction, reverse transcription of the ssRNA genome by reverse transcriptase generates a dsDNA sequence containing correct viral end sequences (U3 and U5) which is Integrated into mammalian genomes by the IN-dCas9 fusion protein.

[0039] FIG. 18, comprising FIG. 18A through FIG. 18C, depicts targeted lentiviral integration via fusion to viral protein. FIG. 18A depicts expression and packaging of IN-dCas9 as N-terminal and C-terminal fusions with viral proteins (for example, viral protein R, VPR) as one approach to achieving targeted lentiviral gene integration. A viral protease cleavage sequence is included between VPR and the IN-dCas9 fusion protein, so that after maturation, the IN-dCas9 will be freed from VPR. FIG. 18B depicts that co-transfection of packaging cells with lentiviral components generates viral particles containing the VPR-IN-dCas9 protein and sgRNA. The packaging plasmid required for viral particle formation (ex. psPax2) contains a mutation within Integrase to inhibit its catalytic activity in the context of the packaging plasmid, thereby preventing non-Integrase-Cas9 mediated integration. FIG. 18C depicts that upon viral transduction, the IN-dCas9 protein is delivered as protein and mediates the integration of the lentiviral donor sequences. The benefit to delivery of the IN-dCas9 fusion and sgRNA as a riboprotein is that it is only be transiently expressed in the target cell.

[0040] FIG. 19, comprising FIG. 19A through FIG. 19C, depicts targeted lentiviral integration via incorporation into transfer plasmid. FIG. 19A depicts that expression of IN-dCas9 fusion protein and/or guide-RNA from within the viral transfer plasmid (or other viral vector, such as AAV) is one approach to achieving targeted lentiviral gene integration. FIG. 19B depicts that in this approach, the transfer plasmid containing the IN-dCas9 fusion protein and sgRNA is co-transfected with packaging and envelope plasmids required to generate lentiviral particles. If using a lentivirus, the packaging plasmid contains a catalytic mutation within Integrase to inhibit non-specific integration. FIG. 19C depicts that upon transduction of a mammalian cell, expression of the IN-dCas9 fusion protein and sgRNA generates components capable of targeting its own viral donor vector for targeted integration (self-integration). This method is used for targeted gene disruption or as a gene drive.

[0041] FIG. 20, comprising FIG. 20A through FIG. 20D, depicts co-delivery of a lentiviral donor sequence. FIG. 20A depicts co-transduction with a lentiviral particle encoding a donor DNA sequence could serve as the integrated donor template. FIG. 20B and FIG. 20C depict that prevention of self-integration of its own viral encoding sequence in this approach could be achieved by using Integrase enzymes from different retroviral family members and their corresponding transfer plasmids. FIG. 20B depicts generation of an HIV lentiviral particle encoding an IN(FIV)-dCas9 fusion protein. FIG. 20C depicts generation of an FIV lentiviral particle comprising an FIV transfer plasmid. FIG. 20D depicts that the HIV lentiviral particle encoding an IN(FIV)-dCas9 fusion protein is utilized to integrate an FIV donor template encoded within an FIV lentiviral particle.

[0042] FIG. 21 depicts targeted lentiviral integration in primary mammalian cells. This data demonstrates lentiviral packaging, delivery and targeted integration of a lentiviral donor template encoding an IRES-tdTO cassette into the ROSA26^{mG/+} locus in mouse embryonic fibroblasts. After two days, ubiquitous red fluorescent protein expression was detectable in MEFs transduced with lentivirus encoding the IRES-tdTO reporter, but retained GFP fluorescence. Remarkably, seven days post-transduction, tdTO red fluorescent cells were detectable in in culture, which lacked green fluorescence in ROSA26^{mG/+} primary cells.

[0043] FIG. 22 depicts targeted lentiviral integration in a mammalian stable cell line. This data demonstrates lentiviral packaging, delivery and targeted integration of a lentiviral donor template encoding an IRES-tdTO cassette into a stably expressed CMV-eGFP in COS-7 cells.

[0044] FIG. 23, comprising FIG. 23A through FIG. 23C depicts DNA Binding Domains for Targeted Integration of Lentiviral Particles. Replacement of the non-specific DNA binding domain of Integrase with the programmable DNA binding domain of dCas9 allows for targeted integration of dsDNA donor templates via delivery in lentiviral particles. Alternative DNA binding domains (such as TALENs) may be utilized for targeted integration as fusions to viral Integrase. Using a similar lentiviral production approach, replacement of dCas9 in our previous packaging strategies with TALENs targeting a specific sequence. FIG. 23A depicts TALENs packaged and delivered as a fusion to Integrase in the context of the gag-pol polyprotein. FIG. 23B depicts TALENs packaged and delivered as a fusion to Integrase as a fusion to a viral protein. FIG. 23C depicts TALENs packaged and delivered as a fusion to Integrase encoded within the transfer plasmid.

[0045] FIG. 24, comprising FIG. 24A through FIG. 24C, depicts experimental results demonstrating that the Ty1 NLS enhances Cas9 DNA editing in mammalian cells. FIG. 24A depicts a diagram of the px330 CRISPR-Cas9 expression plasmid which encodes an hU6-driven single guide-RNA (sgRNA) and CAG driven Cas9 protein containing an N-terminal 3×FLAG tag, SV40 NLS and C-terminal NPM NLS. The Ty1 NLS was cloned in place of the NPM NLS in px330 (px330-Ty1). FIG. 24B depicts results demonstrating a frame-shift activated luciferase reporter was generated in which an upstream 20 nt target sequence (ts) interrupts the open reading from of a downstream luciferase open reading frame. Frameshifts induced by non-homologous end joining (NHEJ) reframe the downstream reporter and allow for Luciferase expression. FIG. 24C depicts results demonstrating co-expression of the Frameshift-responsive luciferase reporter and px330 containing a single guide-RNA specific to the target sequence resulted in a ˜20 fold activation of luciferase activity, relative to a non-targeting sgRNA. Co-expression of px330-Ty1 resulted in a ˜44% enhancement over px330.

[0046] FIG. 25 depicts a schematic demonstrating TALENs can be utilized to direct retroviral integrase-mediated integration of a donor DNA template

[0047] FIG. 26 depicts a schematic of the plasmid DNA integration assay.

[0048] FIG. 27 depicts experimental data demonstrating that TALEN pair separated by 16 bp resulted in ˜6 fold more Chloramphenicol-resistant colonies, whereas a TALEN pair separated by 28 bp was similar to untargeted integrase

[0049] FIG. 29, comprising FIG. 29A through FIG. 29C, depicts experimental results. FIG. 29A depicts expression of amilCP chromoprotein in e. coli results in purple e. coli (white arrowhead). Integrase-Cas-mediated integration of donor sequences containing viral ends disrupt amilCP expression (orange arrowhead) (growth on kanamycin plates). FIG. 29B depicts integration of Insrt IGR-CAT donor template with either blunt ends (ScaI cleaved) or 3′ Processing mimic (FauI cleaved) ends into pCRII-amilCP reporter in mammalian cells. Interestingly, deletion of the C-terminal non-specific DNA binding domain, as a fusion to dCas9, does not inhibit Integrase-Cas mediated integration. Use of ends that mimic 3′ Processing show ˜2 fold increase in CAT resistant clones. FIG. 29C depicts an assessment of Integrase mutations on Integrase-Cas-mediated integration in plasmid DNA. Dimerization inhibiting mutations (E85G and E85F) do not disrupt Integrase-Cas-mediated integration using double guide-RNA targeted integration of IGR-CAT donor template into amilCP. However, the IN E87G mutation cannot be rescued by paired targeting sgRNAs. Interestingly, a tandem INAC fusion to dCas9 (tdINΔC-dCas9) shows ˜2 fold enhanced integration.

### DETAILED DESCRIPTION OF THE INVENTION

[0050] The present invention relates to fusion proteins, nucleic acids encoding fusion proteins, systems and methods for editing genetic material. In one embodiment, the invention relates to retroviral integrase (IN)-CRISPR-associated (Cas) fusion proteins and nucleic acid molecules encoding retroviral IN-Cas fusion proteins. In one embodiment, the IN-Cas fusion protein further comprises a nuclear localization signal (NLS).

[0051] The fusion proteins, nucleic acid molecules, systems and methods of the invention have the ability to deliver donor DNA sequences to targeted genome locations. Further, the invention eliminates the need for homology arms and relies on targeting by guide-RNAs, greatly simplifying editing genetic material.

[0052] In one aspect the invention provides an IN-Cas fusion protein. In one embodiment, the fusion protein comprises a retroviral IN, or a fragment thereof having a first amino acid sequence; a Cas protein having a second amino acid sequence; and a NLS having a third amino acid sequence.

[0053] In one aspect the invention provides nucleic acid molecule encoding an IN-Cas fusion protein. In one embodiment the nucleic acid molecule comprises a first nucleic acid sequence encoding a retroviral IN, or a fragment thereof, a second nucleic acid sequence encoding a Cas protein; and a third nucleic acid sequence encoding a NLS.

[0054] In one embodiment, the retroviral IN can be human immunodeficiency virus (HIV) IN, Rous sarcoma virus (RSV) IN, Mouse mammary tumor virus (MMTV) IN, Moloney murine leukemia virus (MoLV) IN, bovine leukemia virus (BLV) IN, Human T-lymphotropic virus (HTLV) IN, avian sarcoma leukosis virus (ASLV) IN, feline leukemia virus (FLV) IN, xenotropic murine leukemia virus-related virus (XMLV) IN, simian immunodeficiency virus (SIV) IN, feline immunodeficiency virus (FIV) IN, equine infectious anemia virus (EIAV) IN, Prototype foamy virus (PFV) IN, simian foamy virus (SFV) IN, human foamy virus (HFV) IN, walleye dermal sarcoma virus (WDSV) IN, or bovine immunodeficiency virus (BIV) IN. In one embodiment, the Cas protein is Cas9 or Cpf1. In one embodiment, the NLS is a retrotransposon NLS, such as Ty1 NLS. In one embodiment, the retrotransposon NLS increases nuclear localization.

[0055] In one aspect, the invention provides a system for editing genetic material. In one embodiment, the system comprises, in one or more vectors, a nucleic acid sequence encoding a fusion protein, wherein the fusion protein comprises a retroviral IN, or a fragment thereof; a Cas protein, and a NLS; a nucleic acid sequence coding a CRISPR-Cas system guide RNA; and a nucleic acid sequence coding a donor template nucleic acid, wherein the donor template nucleic acid comprises a U3 sequence, a U5 sequence and a donor template sequence.

[0056] In one aspect, the invention provides a method for editing genetic material. In one embodiment, the method comprising administering a nucleic acid molecule of the invention; a guide nucleic acid comprising a targeting nucleotide sequence complimentary to a target region in the gene; and a donor template nucleic acid comprising a U3 sequence, a U5 sequence and a donor template sequence.

### Definitions

[0057] Unless defined otherwise, all technical and scientific terms used herein have the same meaning as commonly understood by one of ordinary skill in the art to which this invention belongs.

[0058] Generally, the nomenclature used herein and the laboratory procedures in cell culture, molecular genetics, organic chemistry, and nucleic acid chemistry and hybridization are those well-known and commonly employed in the art.

[0059] Standard techniques are used for nucleic acid and peptide synthesis. The techniques and procedures are generally performed according to conventional methods in the art and various general references (e.g., Sambrook and Russell, 2012, Molecular Cloning, A Laboratory Approach, Cold Spring Harbor Press, Cold Spring Harbor, N.Y., and Ausubel et al., 2012, Current Protocols in Molecular Biology, John Wiley & Sons, NY), which are provided throughout this document.

[0060] The nomenclature used herein and the laboratory procedures used in analytical chemistry and organic syntheses described below are those well-known and commonly employed in the art. Standard techniques or modifications thereof are used for chemical syntheses and chemical analyses.

[0061] The term “a,” “an,” “the” and similar terms used in the context of the present invention (especially in the context of the claims) are to be construed to cover both the singular and plural unless otherwise indicated herein or clearly contradicted by the context.

[0062] “About” as used herein when referring to a measurable value such as an amount, a temporal duration, and the like, is meant to encompass variations of ±20%, or ±10%, or ±5%, or ±1%, or ±0.1% from the specified value, as such variations are appropriate to perform the disclosed methods.

[0063] “Antisense” refers particularly to the nucleic acid sequence of the non-coding strand of a double stranded DNA molecule encoding a protein, or to a sequence which is substantially homologous to the non-coding strand. As defined herein, an antisense sequence is complementary to the sequence of a double stranded DNA molecule encoding a protein. It is not necessary that the antisense sequence be complementary solely to the coding portion of the coding strand of the DNA molecule. The antisense sequence may be complementary to regulatory sequences specified on the coding strand of a DNA molecule encoding a protein, which regulatory sequences control expression of the coding sequences.

[0064] A “disease” is a state of health of an animal wherein the animal cannot maintain homeostasis, and wherein if the disease is not ameliorated then the animal's health continues to deteriorate.

[0065] In contrast, a “disorder” in an animal is a state of health in which the animal is able to maintain homeostasis, but in which the animal's state of health is less favorable than it would be in the absence of the disorder. Left untreated, a disorder does not necessarily cause a further decrease in the animal's state of health.

[0066] A disease or disorder is “alleviated” if the severity of a sign or symptom of the disease or disorder, the frequency with which such a sign or symptom is experienced by a patient, or both, is reduced.

[0067] “Encoding” refers to the inherent property of specific sequences of nucleotides in a polynucleotide, such as a gene, a cDNA, or an mRNA, to serve as templates for synthesis of other polymers and macromolecules in biological processes having either a defined sequence of nucleotides (i.e., rRNA, tRNA and mRNA) or a defined sequence of amino acids and the biological properties resulting therefrom. Thus, a gene encodes a protein if transcription and translation of mRNA corresponding to that gene produces the protein in a cell or other biological system. Both the coding strand, the nucleotide sequence of which is identical to the mRNA sequence and is usually provided in sequence listings, and the non-coding strand, used as the template for transcription of a gene or cDNA, can be referred to as encoding the protein or other product of that gene or cDNA.

[0068] The terms “patient,” “subject,” “individual,” and the like are used interchangeably herein, and refer to any animal, or cells thereof whether in vitro or in vivo, amenable to the methods described herein. In certain non-limiting embodiments, the patient, subject or individual is a human.

[0069] By the term “specifically binds,” as used herein with respect to an antibody, is meant an antibody which recognizes a specific antigen, but does not substantially recognize or bind other molecules in a sample. For example, an antibody that specifically binds to an antigen from one species may also bind to that antigen from one or more species. But, such cross-species reactivity does not itself alter the classification of an antibody as specific. In another example, an antibody that specifically binds to an antigen may also bind to different allelic forms of the antigen. However, such cross reactivity does not itself alter the classification of an antibody as specific.

[0070] In some instances, the terms “specific binding” or “specifically binding,” can be used in reference to the interaction of an antibody, a protein, or a peptide with a second chemical species, to mean that the interaction is dependent upon the presence of a particular structure (e.g., an antigenic determinant or epitope) on the chemical species; for example, an antibody recognizes and binds to a specific protein structure rather than to proteins generally. If an antibody is specific for epitope “A”, the presence of a molecule containing epitope A (or free, unlabeled A), in a reaction containing labeled “A” and the antibody, will reduce the amount of labeled A bound to the antibody.

[0071] A “coding region” of a gene consists of the nucleotide residues of the coding strand of the gene and the nucleotides of the non-coding strand of the gene which are homologous with or complementary to, respectively, the coding region of an mRNA molecule which is produced by transcription of the gene.

[0072] A “coding region” of a mRNA molecule also consists of the nucleotide residues of the mRNA molecule which are matched with an anti-codon region of a transfer RNA molecule during translation of the mRNA molecule or which encode a stop codon. The coding region may thus include nucleotide residues comprising codons for amino acid residues which are not present in the mature protein encoded by the mRNA molecule (e.g., amino acid residues in a protein export signal sequence).

[0073] “Complementary” as used herein to refer to a nucleic acid, refers to the broad concept of sequence complementarity between regions of two nucleic acid strands or between two regions of the same nucleic acid strand. It is known that an adenine residue of a first nucleic acid region is capable of forming specific hydrogen bonds (“base pairing”) with a residue of a second nucleic acid region which is antiparallel to the first region if the residue is thymine or uracil. Similarly, it is known that a cytosine residue of a first nucleic acid strand is capable of base pairing with a residue of a second nucleic acid strand which is antiparallel to the first strand if the residue is guanine. A first region of a nucleic acid is complementary to a second region of the same or a different nucleic acid if, when the two regions are arranged in an antiparallel fashion, at least one nucleotide residue of the first region is capable of base pairing with a residue of the second region. In one embodiment, the first region comprises a first portion and the second region comprises a second portion, whereby, when the first and second portions are arranged in an antiparallel fashion, at least about 50%, at least about 75%, at least about 90%, or at least about 95% of the nucleotide residues of the first portion are capable of base pairing with nucleotide residues in the second portion. In one embodiment, all nucleotide residues of the first portion are capable of base pairing with nucleotide residues in the second portion.

[0074] The term “DNA” as used herein is defined as deoxyribonucleic acid.

[0075] The term “expression” as used herein is defined as the transcription and/or translation of a particular nucleotide sequence driven by its promoter.

[0076] The term “expression vector” as used herein refers to a vector containing a nucleic acid sequence coding for at least part of a gene product capable of being transcribed. In some cases, RNA molecules are then translated into a protein, polypeptide, or peptide. In other cases, these sequences are not translated, for example, in the production of antisense molecules, siRNA, ribozymes, and the like. Expression vectors can contain a variety of control sequences, which refer to nucleic acid sequences necessary for the transcription and possibly translation of an operatively linked coding sequence in a particular host organism. In addition to control sequences that govern transcription and translation, vectors and expression vectors may contain nucleic acid sequences that serve other functions as well.

[0077] As used herein the term “wild type” is a term of the art understood by skilled persons and means the typical form of an organism, strain, gene or characteristic as it occurs in nature as distinguished from mutant or variant forms.

[0078] The term “homology” refers to a degree of complementarity. There may be partial homology or complete homology (i.e., identity). Homology is often measured using sequence analysis software (e.g., Sequence Analysis Software Package of the Genetics Computer Group. University of Wisconsin Biotechnology Center. 1710 University Avenue. Madison, Wis. 53705). Such software matches similar sequences by assigning degrees of homology to various substitutions, deletions, insertions, and other modifications. Conservative substitutions typically include substitutions within the following groups: glycine, alanine; valine, isoleucine, leucine; aspartic acid, glutamic acid, asparagine, glutamine; serine, threonine; lysine, arginine; and phenylalanine, tyrosine.

[0079] “Isolated” means altered or removed from the natural state. For example, a nucleic acid or a peptide naturally present in its normal context in a living animal is not “isolated,” but the same nucleic acid or peptide partially or completely separated from the coexisting materials of its natural context is “isolated.” An isolated nucleic acid or protein can exist in substantially purified form, or can exist in a non-native environment such as, for example, a host cell.

[0080] The term “isolated” when used in relation to a nucleic acid, as in “isolated oligonucleotide” or “isolated polynucleotide” refers to a nucleic acid sequence that is identified and separated from at least one contaminant with which it is ordinarily associated in its source. Thus, an isolated nucleic acid is present in a form or setting that is different from that in which it is found in nature. In contrast, non-isolated nucleic acids (e.g., DNA and RNA) are found in the state they exist in nature. For example, a given DNA sequence (e.g., a gene) is found on the host cell chromosome in proximity to neighboring genes; RNA sequences (e.g., a specific mRNA sequence encoding a specific protein), are found in the cell as a mixture with numerous other mRNAs that encode a multitude of proteins. However, isolated nucleic acid includes, by way of example, such nucleic acid in cells ordinarily expressing that nucleic acid where the nucleic acid is in a chromosomal location different from that of natural cells, or is otherwise flanked by a different nucleic acid sequence than that found in nature. The isolated nucleic acid or oligonucleotide may be present in single-stranded or double-stranded form. When an isolated nucleic acid or oligonucleotide is to be utilized to express a protein, the oligonucleotide contains at a minimum, the sense or coding strand (i.e., the oligonucleotide may be single-stranded), but may contain both the sense and anti-sense strands (i.e., the oligonucleotide may be double-stranded).

[0081] The term “isolated” when used in relation to a polypeptide, as in “isolated protein” or “isolated polypeptide” refers to a polypeptide that is identified and separated from at least one contaminant with which it is ordinarily associated in its source. Thus, an isolated polypeptide is present in a form or setting that is different from that in which it is found in nature. In contrast, non-isolated polypeptides (e.g., proteins and enzymes) are found in the state they exist in nature.

[0082] By “nucleic acid” is meant any nucleic acid, whether composed of deoxyribonucleosides or ribonucleosides, and whether composed of phosphodiester linkages or modified linkages such as phosphotriester, phosphoramidate, siloxane, carbonate, carboxymethylester, acetamidate, carbamate, thioether, bridged phosphoramidate, bridged methylene phosphonate, phosphorothioate, methylphosphonate, phosphorodithioate, bridged phosphorothioate or sulfone linkages, and combinations of such linkages. The term nucleic acid also specifically includes nucleic acids composed of bases other than the five biologically occurring bases (adenine, guanine, thymine, cytosine and uracil). The term “nucleic acid” typically refers to large polynucleotides.

[0083] Conventional notation is used herein to describe polynucleotide sequences: the left-hand end of a single-stranded polynucleotide sequence is the 5′-end; the left-hand direction of a double-stranded polynucleotide sequence is referred to as the 5′-direction.

[0084] The direction of 5′ to 3′ addition of nucleotides to nascent RNA transcripts is referred to as the transcription direction. The DNA strand having the same sequence as an mRNA is referred to as the “coding strand”; sequences on the DNA strand which are located 5′ to a reference point on the DNA are referred to as “upstream sequences”; sequences on the DNA strand which are 3′ to a reference point on the DNA are referred to as “downstream sequences.”

[0085] By “expression cassette” is meant a nucleic acid molecule comprising a coding sequence operably linked to promoter/regulatory sequences necessary for transcription and, optionally, translation of the coding sequence.

[0086] The term “operably linked” as used herein refer to the linkage of nucleic acid sequences in such a manner that a nucleic acid molecule capable of directing the transcription of a given gene and/or the synthesis of a desired protein molecule is produced. The term also refers to the linkage of sequences encoding amino acids in such a manner that a functional (e.g., enzymatically active, capable of binding to a binding partner, capable of inhibiting, etc.) protein or polypeptide is produced.

[0087] As used herein, the term “promoter/regulatory sequence” means a nucleic acid sequence which is required for expression of a gene product operably linked to the promoter/regulator sequence. In some instances, this sequence may be the core promoter sequence and in other instances, this sequence may also include an enhancer sequence and other regulatory elements which are required for expression of the gene product. The promoter/regulatory sequence may, for example, be one which expresses the gene product in a n inducible manner.

[0088] As used herein, “stringent conditions” for hybridization refer to conditions under which a nucleic acid having complementarity to a target sequence predominantly hybridizes with the target sequence, and substantially does not hybridize to non-target sequences. Stringent conditions are generally sequence-dependent, and vary depending on a number of factors. In general, the longer the sequence, the higher the temperature at which the sequence specifically hybridizes to its target sequence. Non-limiting examples of stringent conditions are described in detail in Tijssen (1993), Laboratory Techniques In Biochemistry And Molecular Biology-Hybridization With Nucleic Acid Probes Part 1, Second Chapter “Overview of principles of hybridization and the strategy of nucleic acid probe assay”, Elsevier, N.Y.

[0089] “Hybridization” refers to a reaction in which one or more polynucleotides react to form a complex that is stabilized via hydrogen bonding between the bases of the nucleotide residues. The hydrogen bonding may occur by Watson Crick base pairing, Hoogstein binding, or in any other sequence specific manner. The complex may comprise two strands forming a duplex structure, three or more strands forming a multi stranded complex, a single self-hybridizing strand, or any combination of these. A hybridization reaction may constitute a step in a more extensive process, such as the initiation of PCR, or the cleavage of a polynucleotide by an enzyme. A sequence capable of hybridizing with a given sequence is referred to as the “complement” of the given sequence.

[0090] An “inducible” promoter is a nucleotide sequence which, when operably linked with a polynucleotide which encodes or specifies a gene product, causes the gene product to be produced substantially only when an inducer which corresponds to the promoter is present.

[0091] A “constitutive” promoter is a nucleotide sequence which, when operably linked with a polynucleotide which encodes or specifies a gene product, causes the gene product to be produced in a cell under most or all physiological conditions of the cell.

[0092] The term “polynucleotide” as used herein is defined as a chain of nucleotides. Furthermore, nucleic acids are polymers of nucleotides. Thus, nucleic acids and polynucleotides as used herein are interchangeable. One skilled in the art has the general knowledge that nucleic acids are polynucleotides, which can be hydrolyzed into the monomeric “nucleotides.” The monomeric nucleotides can be hydrolyzed into nucleosides. As used herein polynucleotides include, but are not limited to, all nucleic acid sequences which are obtained by any means available in the art, including, without limitation, recombinant means, i.e., the cloning of nucleic acid sequences from a recombinant library or a cell genome, using ordinary cloning technology and PCR, and the like, and by synthetic means.

[0093] In the context of the present invention, the following abbreviations for the commonly occurring nucleic acid bases are used. “A” refers to adenosine, “C” refers to cytosine, “G” refers to guanosine, “T” refers to thymidine, and “U” refers to uridine.

[0094] As used herein, the terms “peptide,” “polypeptide,” and “protein” are used interchangeably, and refer to a compound comprised of amino acid residues covalently linked by peptide bonds. A protein or peptide must contain at least two amino acids, and no limitation is placed on the maximum number of amino acids that can comprise a protein's or peptide's sequence. Polypeptides include any peptide or protein comprising two or more amino acids joined to each other by peptide bonds. As used herein, the term refers to both short chains, which also commonly are referred to in the art as peptides, oligopeptides and oligomers, for example, and to longer chains, which generally are referred to in the art as proteins, of which there are many types. “Polypeptides” include, for example, biologically active fragments, substantially homologous polypeptides, oligopeptides, homodimers, heterodimers, variants of polypeptides, modified polypeptides, derivatives, analogs, fusion proteins, among others. The polypeptides include natural peptides, recombinant peptides, synthetic peptides, or a combination thereof.

[0095] The term “RNA” as used herein is defined as ribonucleic acid.

[0096] “Recombinant polynucleotide” refers to a polynucleotide having sequences that are not naturally joined together. An amplified or assembled recombinant polynucleotide may be included in a suitable vector, and the vector can be used to transform a suitable host cell.

[0097] A recombinant polynucleotide may serve a non-coding function (e.g., promoter, origin of replication, ribosome-binding site, etc.) as well.

[0098] The term “recombinant polypeptide” as used herein is defined as a polypeptide produced by using recombinant DNA methods.

[0099] As used herein, “Transcription Activator-Like Effector Nucleases (TALENs)” are artificial restriction enzymes generated by fusing the TAL effector DNA binding domain to a DNA cleavage domain. These reagents enable efficient, programmable, and specific DNA cleavage and represent powerful tools for editing genetic material in situ. Transcription activator-like effectors (TALEs) can be quickly engineered to bind practically any DNA sequence. The term TALEN, as used herein, is broad and includes a monomeric TALEN that can cleave double stranded DNA without assistance from another TALEN. The term TALEN is also used to refer to one or both members of a pair of TALENs that are engineered to work together to cleave DNA at the same site. TALENs that work together may be referred to as a left-TALEN and a right-TALEN, which references the handedness of DNA. See U.S. Ser. No. 12/965,590; U.S. Ser. No. 13/426,991 (U.S. Pat. No. 8,450,471); U.S. Ser. No. 13/427,040 (U.S. Pat. No. 8,440,431); U.S. Ser. No. 13/427,137 (U.S. Pat. No. 8,440,432); and U.S. Ser. No. 13/738,381, all of which are incorporated by reference herein in their entirety.

[0100] “Variant” as the term is used herein, is a nucleic acid sequence or a peptide sequence that differs in sequence from a reference nucleic acid sequence or peptide sequence respectively, but retains essential biological properties of the reference molecule. Changes in the sequence of a nucleic acid variant may not alter the amino acid sequence of a peptide encoded by the reference nucleic acid, or may result in amino acid substitutions, additions, deletions, fusions and truncations. Changes in the sequence of peptide variants are typically limited or conservative, so that the sequences of the reference peptide and the variant are closely similar overall and, in many regions, identical. A variant and reference peptide can differ in amino acid sequence by one or more substitutions, additions, deletions in any combination. A variant of a nucleic acid or peptide can be a naturally occurring such as an allelic variant, or can be a variant that is not known to occur naturally. Non-naturally occurring variants of nucleic acids and peptides may be made by mutagenesis techniques or by direct synthesis.

[0101] A “vector” is a composition of matter which comprises an isolated nucleic acid and which can be used to deliver the isolated nucleic acid to the interior of a cell. Numerous vectors are known in the art including, but not limited to, linear polynucleotides, polynucleotides associated with ionic or amphiphilic compounds, plasmids, and viruses. Thus, the term “vector” includes an autonomously replicating plasmid or a virus. The term should also be construed to include non-plasmid and non-viral compounds which facilitate transfer of nucleic acid into cells, such as, for example, polylysine compounds, liposomes, and the like. Examples of viral vectors include, but are not limited to, adenoviral vectors, adeno-associated virus vectors, retroviral vectors, and the like.

[0102] Ranges: throughout this disclosure, various aspects of the invention can be presented in a range format. It should be understood that the description in range format is merely for convenience and brevity and should not be construed as an inflexible limitation on the scope of the invention. Accordingly, the description of a range should be considered to have specifically disclosed all the possible subranges as well as individual numerical values within that range. For example, description of a range such as from 1 to 6 should be considered to have specifically disclosed subranges such as from 1 to 3, from 1 to 4, from 1 to 5, from 2 to 4, from 2 to 6, from 3 to 6 etc., as well as individual numbers within that range, for example, 1, 2, 2.7, 3, 4, 5, 5.3, and 6. This applies regardless of the breadth of the range.

### Fusion Proteins

[0103] In one aspect, the present invention is based on the development of novel fusions of editing proteins which are effectively delivered to the nucleus. In one aspect, the invention provides fusion proteins comprising an editing protein and a nuclear localization signal (NLS) having a second amino acid sequence.

[0104] In one embodiment, the editing protein includes, but is not limited to, a CRISPR-associated (Cas) protein, transcription activator-like effector-based nuclease (TALEN) protein, a zinc finger nuclease (ZFN) protein, and a protein having a DNA binding domain.

[0105] Non-limiting examples of Cas proteins include Cas1, Cas1B, Cas2, Cas3, Cas4, Cas5, Cas6, Cas7, Cas8, Cas9, Cas10, Csy1, Csy2, Csy3, Cse1, Cse2, Csc1, Csc2, Csa5, Csn2. Csm2, Csm3, Csm4, Csm5, Csm6, Cmr1, Cmr3, Cmr4, Cmr5, Cmr6, Csb1, Csb2, Csb3, Csx17, Csx14, Csx10, Csx16, CsaX, Csx3, Csx1, Csx15, Csf1, Csf2, Csf3, Csf4, SpCas9, StCas9, NmCas9, SaCas9, CjCas9, CjCas9, AsCpf1, LbCpf1, FnCpf1, VRER SpCas9, VQR SpCas9, xCas9 3.7, homologs thereof, orthologs thereof, or modified versions thereof. In some embodiments, the Cas protein has DNA or RNA cleavage activity. In some embodiments, the Cas protein directs cleavage of one or both strands of a nucleic acid molecule at the location of a target sequence, such as within the target sequence and/or within the complement of the target sequence. In some embodiments, the Cas protein directs cleavage of one or both strands within about 1, 2, 3, 4, 5, 6, 7, 8, 9, 10, 15, 20, 25, 50, 100, 200, 500, or more base pairs from the first or last nucleotide of a target sequence. In one embodiment, the Cas protein is Cas9, Cas13, or Cpf1. In one embodiment, Cas protein is Cas9. In one embodiment, Cas protein is catalytically deficient (dCas).

[0106] In one embodiment, the Cas protein comprises a sequence at least 70%, at least 71%, at least 72%, at least 73%, at least 74%, at least 75%, at least 76%, at least 77%, at least 78%, at least 79%, 80%, at least 81%, at least 82%, at least 83%, at least 84%, at least 85%, at least 86%, at least 87%, at least 88%, at least 89%, 90%, at least 91%, at least 92%, at least 93%, at least 94%, at least 95%, at least 96%, at least 97%, at least 98%, or at least 99% identical to one of SEQ ID NOs:41-46. In one embodiment, the Cas protein comprises a sequence of one of SEQ ID NOs:41-46.

[0107] In one embodiment, the NLS is a retrotransposon NLS. In one embodiment, the NLS is derived from Ty1, yeast GAL4, SKI3, L29 or histone H2B proteins, polyoma virus large T protein, VP1 or VP2 capsid protein, SV40 VP1 or VP2 capsid protein, Adenovirus E1 a or DBP protein, influenza virus NS1 protein, hepatitis vims core antigen or the mammalian lamin, c-myc, max, c-myb, p53, c-erbA, jun, Tax, steroid receptor or Mx proteins, Nucleoplasmin (NPM2), Nucleophosmin (NPM1), or simian vims 40 (“SV40”) T-antigen. In one embodiment, the NLS is a Ty1 or Ty1-derived NLS, a Ty2 or Ty2-derived NLS or a MAK11 or MAK11-derived NLS. In one embodiment, the Ty1 NLS comprises an amino acid sequence of SEQ ID NO:51. In one embodiment, the Ty2 NLS comprises an amino acid sequence of SEQ ID NO:254. In one embodiment, the MAK11 NLS comprises an amino acid sequence of SEQ ID NO:256. In one embodiment, the NLS comprises a sequence at least 70%, at least 71%, at least 72%, at least 73%, at least 74%, at least 75%, at least 76%, at least 77%, at least 78%, at least 79%, 80%, at least 81%, at least 82%, at least 83%, at least 84%, at least 85%, at least 86%, at least 87%, at least 88%, at least 89%, 90%, at least 91%, at least 92%, at least 93%, at least 94%, at least 95%, at least 96%, at least 97%, at least 98%, or at least 99% identical to one of SEQ ID NOs:47-56 and 254-257. In one embodiment, the NLS protein comprises a sequence of one of SEQ ID NOs: 47-56 and 254-257.

[0108] In one embodiment, the NLS is a Ty1-like NLS. For example, in one embodiment, the Ty-like NLS comprises KKRX motif. In one embodiment, the Ty1-like NLS comprises KKRX motif at the N-terminal end. In one embodiment, the Ty1-like NLS comprises KKR motif In one embodiment, the Ty1-like NLS comprises KKR motif at the C-terminal end. In one embodiment, the Ty1-like NLS comprises a KKRX and a KKR motif. In one embodiment, the Ty1-like NLS comprises a KKRX at the N-terminal end and a KKR motif at the C-terminal end. In one embodiment, the Ty1-like NLS comprises at least 20 amino acids. In one embodiment, the Ty1-like NLS comprises between 20 and 40 amino acids. In one embodiment, the Ty1-like NLS comprises a sequence at least 70%, at least 71%, at least 72%, at least 73%, at least 74%, at least 75%, at least 76%, at least 77%, at least 78%, at least 79%, 80%, at least 81%, at least 82%, at least 83%, at least 84%, at least 85%, at least 86%, at least 87%, at least 88%, at least 89%, 90%, at least 91%, at least 92%, at least 93%, at least 94%, at least 95%, at least 96%, at least 97%, at least 98%, or at least 99% identical to one of SEQ ID NOs:275-887. In one embodiment, the Ty1-like NLS protein comprises a sequence of one of SEQ ID NOs:275-887.

[0109] In one embodiment, the fusion protein comprises a sequence at least 70%, at least 71%, at least 72%, at least 73%, at least 74%, at least 75%, at least 76%, at least 77%, at least 78%, at least 79%, 80%, at least 81%, at least 82%, at least 83%, at least 84%, at least 85%, at least 86%, at least 87%, at least 88%, at least 89%, 90%, at least 91%, at least 92%, at least 93%, at least 94%, at least 95%, at least 96%, at least 97%, at least 98%, or at least 99% identical to one of SEQ ID NOs:249-250. In one embodiment, the fusion protein comprises a sequence of one of SEQ ID NOs:249-250.

[0110] In one aspect, the present invention is based on the development of novel fusions of editing proteins and retroviral integrase proteins which are effectively delivered to the nucleus. These fusion proteins combine the DNA integration activity of viral integrase and the programmable DNA targeting capability of catalytically dead Cas. Thus, since this fusion protein does not rely on cellular pathways for DNA insertion, or require cellular energy source, such as ATP, this enzyme can work in many contexts, such as from in vitro, to prokaryotic cells, to dividing or non-dividing eukaryotic cells. Further, because integrase does not require regions of homology for insertion, only small terminal motif sequences specific to each integrase family, these fusion proteins editing can utilize a single DNA donor template for multiplex genome integration, if guided by multiple guide-RNAs.

[0111] Thus, in one aspect, the present invention provides fusion proteins comprising a CRISPR-associated (Cas) protein having a first amino acid sequence, a nuclear localization signal (NLS) having a second amino acid sequence, and a retroviral integrase (IN) or a fragment or variant thereof having a third amino acid sequence.

[0112] In one embodiment, the retroviral IN is human immunodeficiency virus (HIV) IN, Rous sarcoma virus (RSV) IN, Mouse mammary tumor virus (MMTV) IN, Moloney murine leukemia virus (MoLV) IN, bovine leukemia virus (BLV) IN, Human T-lymphotropic virus (HTLV) IN, avian sarcoma leukosis virus (ASLV) IN, feline leukemia virus (FLV) IN, xenotropic murine leukemia virus-related virus (XMLV) IN, simian immunodeficiency virus (SIV) IN, feline immunodeficiency virus (FIV) IN, equine infectious anemia virus (EIAV) IN, Prototype foamy virus (PFV) IN, simian foamy virus (SFV) IN, human foamy virus (HFV) IN, walleye dermal sarcoma virus (WDSV) IN, or bovine immunodeficiency virus (BIV) IN.

[0113] In one embodiment, the integrase is a retrotransposon integrase. In one embodiment, the retrotransposon integrase is Ty1, or Ty2. In one embodiment, the integrase is a bacterial integrase. In one embodiment, the bacterial integrase is insF.

[0114] In one embodiment, the retroviral IN is HIV IN. In one embodiment, the HIV IN comprises one or more amino acid substitutions, wherein the substitution improves catalytic activity, improves solubility, or increases interaction with one or more host cellular cofactors. In one embodiment, HIV IN comprises one or more, two or more, three or more, four or more, five or more, six or more, seven or more, eight or more or nine amino acid substitutions selected from the group consisting of E85G, E85F, D116N, F185K, C280S, T97A, Y134R, G140S, and Q148H. In one embodiment, HIV IN comprises amino acid substitutions F185K and C280S. In one embodiment, HIV IN comprises amino acid substitutions T97A and Y134R. In one embodiment, HIV IN comprises amino acid substitutions G140S and Q148H.

[0115] In one embodiment, the retroviral IN fragment comprises the IN N-terminal domain (NTD), and the IN catalytic core domain (CCD). In one embodiment, the retroviral IN fragment comprises the IN CCD and the IN C-terminal domain (CTD). In one embodiment, the retroviral IN fragment comprises the IN NTD. In one embodiment, the retroviral IN fragment comprises the IN CCD. In one embodiment, the retroviral IN fragment comprises the IN CTD. The in one embodiment, the fragments of the integrase retain at least one activity of the full length integrase. Retroviral integrase functions and fragments are known in the art and can be found in, for example, Li, et al., 2011, Virology 411:194-205, and Maertens et al., 2010, Nature 468:326-29, which are incorporated by reference herein.

[0116] In one embodiment, the retroviral IN comprises a sequence at least 70%, at least 71%, at least 72%, at least 73%, at least 74%, at least 75%, at least 76%, at least 77%, at least 78%, at least 79%, 80%, at least 81%, at least 82%, at least 83%, at least 84%, at least 85%, at least 86%, at least 87%, at least 88%, at least 89%, 90%, at least 91%, at least 92%, at least 93%, at least 94%, at least 95%, at least 96%, at least 97%, at least 98%, or at least 99% identical to one of SEQ ID NOs:1-40. In one embodiment, the retroviral IN comprises a sequence of one of SEQ ID NOs:1-40.

[0117] In some embodiments, the CRISPR-Cas domain comprises a Cas protein. Non-limiting examples of Cas proteins include Cas1, Cas1B, Cas2, Cas3, Cas4, Cas5, Cas6, Cas7, Cas8, Cas9, Cas10, Csy1, Csy2, Csy3, Cse1, Cse2, Csc1, Csc2, Csa5, Csn2. Csm2, Csm3, Csm4, Csm5, Csm6, Cmr1, Cmr3, Cmr4, Cmr5, Cmr6, Csb1, Csb2, Csb3, Csx17, Csx14, Csx10, Csx16, CsaX, Csx3, Csx1, Csx15, Csf1, Csf2, Csf3, Csf4, SpCas9, StCas9, NmCas9, SaCas9, CjCas9, CjCas9, AsCpf1, LbCpf1, FnCpf1, VRER SpCas9, VQR SpCas9, xCas9 3.7, homologs thereof, orthologs thereof, or modified versions thereof. In some embodiments, the Cas protein has DNA or RNA cleavage activity. In some embodiments, the Cas protein directs cleavage of one or both strands of a nucleic acid molecule at the location of a target sequence, such as within the target sequence and/or within the complement of the target sequence. In some embodiments, the Cas protein directs cleavage of one or both strands within about 1, 2, 3, 4, 5, 6, 7, 8, 9, 10, 15, 20, 25, 50, 100, 200, 500, or more base pairs from the first or last nucleotide of a target sequence. In one embodiment, the Cas protein is Cas9, Cas13, or Cpf1. In one embodiment, Cas protein is catalytically deficient (dCas).

[0118] In one embodiment, the Cas protein comprises a sequence at least 70%, at least 71%, at least 72%, at least 73%, at least 74%, at least 75%, at least 76%, at least 77%, at least 78%, at least 79%, 80%, at least 81%, at least 82%, at least 83%, at least 84%, at least 85%, at least 86%, at least 87%, at least 88%, at least 89%, 90%, at least 91%, at least 92%, at least 93%, at least 94%, at least 95%, at least 96%, at least 97%, at least 98%, or at least 99% identical to one of SEQ ID NOs:41-46. In one embodiment, the Cas protein comprises a sequence of one of SEQ ID NOs:41-46.

[0119] In one embodiment, the NLS is a retrotransposon NLS. In one embodiment, the NLS is derived from Ty1, yeast GAL4, SKI3, L29 or histone H2B proteins, polyoma virus large T protein, VP1 or VP2 capsid protein, SV40 VP1 or VP2 capsid protein, Adenovirus E1 a or DBP protein, influenza virus NS1 protein, hepatitis vims core antigen or the mammalian lamin, c-myc, max, c-myb, p53, c-erbA, jun, Tax, steroid receptor or Mx proteins, Nucleoplasmin (NPM2), Nucleophosmin (NPM1), or simian vims 40 (“SV40”) T-antigen. In one embodiment, the NLS is a Ty1 or Ty1-derived NLS, a Ty2 or Ty2-derived NLS or a MAK11 or MAK11-derived NLS. In one embodiment, the Ty1 NLS comprises an amino acid sequence of SEQ ID NO:51. In one embodiment, the Ty2 NLS comprises an amino acid sequence of SEQ ID NO:254. In one embodiment, the MAK11 NLS comprises an amino acid sequence of SEQ ID NO:256. In one embodiment, the NLS comprises a sequence at least 70%, at least 71%, at least 72%, at least 73%, at least 74%, at least 75%, at least 76%, at least 77%, at least 78%, at least 79%, 80%, at least 81%, at least 82%, at least 83%, at least 84%, at least 85%, at least 86%, at least 87%, at least 88%, at least 89%, 90%, at least 91%, at least 92%, at least 93%, at least 94%, at least 95%, at least 96%, at least 97%, at least 98%, or at least 99% identical to one of SEQ ID NOs:47-56 and 254-257. In one embodiment, the NLS protein comprises a sequence of one of SEQ ID NOs: 47-56 and 254-257.

[0120] In one embodiment, the NLS is a Ty1-like NLS. For example, in one embodiment, the Ty-like NLS comprises KKRX motif. In one embodiment, the Ty1-like NLS comprises KKRX motif at the N-terminal end. In one embodiment, the Ty1-like NLS comprises KKR motif In one embodiment, the Ty1-like NLS comprises KKR motif at the C-terminal end. In one embodiment, the Ty1-like NLS comprises a KKRX and a KKR motif. In one embodiment, the Ty1-like NLS comprises a KKRX at the N-terminal end and a KKR motif at the C-terminal end. In one embodiment, the Ty1-like NLS comprises at least 20 amino acids. In one embodiment, the Ty1-like NLS comprises between 20 and 40 amino acids. In one embodiment, the Ty1-like NLS comprises a sequence at least 70%, at least 71%, at least 72%, at least 73%, at least 74%, at least 75%, at least 76%, at least 77%, at least 78%, at least 79%, 80%, at least 81%, at least 82%, at least 83%, at least 84%, at least 85%, at least 86%, at least 87%, at least 88%, at least 89%, 90%, at least 91%, at least 92%, at least 93%, at least 94%, at least 95%, at least 96%, at least 97%, at least 98%, or at least 99% identical to one of SEQ ID NOs: 275-887. In one embodiment, the Ty1-like NLS protein comprises a sequence of one of SEQ ID NOs: 275-887.

[0121] In one embodiment, the fusion protein comprises a sequence at least 70%, at least 71%, at least 72%, at least 73%, at least 74%, at least 75%, at least 76%, at least 77%, at least 78%, at least 79%, 80%, at least 81%, at least 82%, at least 83%, at least 84%, at least 85%, at least 86%, at least 87%, at least 88%, at least 89%, 90%, at least 91%, at least 92%, at least 93%, at least 94%, at least 95%, at least 96%, at least 97%, at least 98%, or at least 99% identical to one of SEQ ID NOs:249-250. In one embodiment, the fusion protein comprises a sequence of one of SEQ ID NOs:249-250.

[0122] In one embodiment, the NLS comprises a combination of two distinct NLS. For example, in one embodiment, the NLS comprises a Ty1-derived NLS and a SV40-derived NLS. In one embodiment, the NLS is a Ty1 or Ty1-derived NLS, a Ty2 or Ty2-derived NLS or a MAK11 or MAK11-derived NLS. In one embodiment, the Ty1 NLS comprises an amino acid sequence of SEQ ID NO:51. In one embodiment, the Ty2 NLS comprises an amino acid sequence of SEQ ID NO:254. In one embodiment, the MAK11 NLS comprises an amino acid sequence of SEQ ID NO:256.

[0123] In one embodiment, the NLS comprises two copies of the same NLS. For example, in one embodiment, the NLS comprises a multimer of a first Ty1-derived NLS and a second Ty1-derived NLS.

[0124] In one embodiment, the NLS comprises a first sequence at least 70%, at least 71%, at least 72%, at least 73%, at least 74%, at least 75%, at least 76%, at least 77%, at least 78%, at least 79%, 80%, at least 81%, at least 82%, at least 83%, at least 84%, at least 85%, at least 86%, at least 87%, at least 88%, at least 89%, 90%, at least 91%, at least 92%, at least 93%, at least 94%, at least 95%, at least 96%, at least 97%, at least 98%, or at least 99% to one of SEQ ID NOs:47-56, 254-257, and 275-887, and a second a sequence at least 70%, at least 71%, at least 72%, at least 73%, at least 74%, at least 75%, at least 76%, at least 77%, at least 78%, at least 79%, 80%, at least 81%, at least 82%, at least 83%, at least 84%, at least 85%, at least 86%, at least 87%, at least 88%, at least 89%, 90%, at least 91%, at least 92%, at least 93%, at least 94%, at least 95%, at least 96%, at least 97%, at least 98%, or at least 99% to one of SEQ ID NOs:47-56, 254-257, and 275-887. In one embodiment, the first sequence and second sequence are the same. In one embodiment, the first sequence and second sequence are different.

[0125] In one embodiment, the fusion protein comprises a sequence 70%, at least 71%, at least 72%, at least 73%, at least 74%, at least 75%, at least 76%, at least 77%, at least 78%, at least 79%, 80%, at least 81%, at least 82%, at least 83%, at least 84%, at least 85%, at least 86%, at least 87%, at least 88%, at least 89%, 90%, at least 91%, at least 92%, at least 93%, at least 94%, at least 95%, at least 96%, at least 97%, at least 98%, or at least 99% to one of SEQ ID NOs:57-98. In one embodiment, the fusion protein comprises a sequence of one of SEQ ID NOs:57-98.

[0126] The peptide of the present invention may be made using chemical methods. For example, peptides can be synthesized by solid phase techniques (Roberge J Y et al (1995) Science 269: 202-204), cleaved from the resin, and purified by preparative high-performance liquid chromatography. Automated synthesis may be achieved, for example, using the ABI 431 A Peptide Synthesizer (Perkin Elmer) in accordance with the instructions provided by the manufacturer.

[0127] The invention should also be construed to include any form of a peptide having substantial homology to a fusion-protein disclosed herein. In one embodiment, a peptide which is “substantially homologous” is about 50% homologous, about 70% homologous, about 80% homologous, about 90% homologous, about 95% homologous, or about 99% homologous to amino acid sequence of a fusion-protein disclosed herein.

[0128] The peptide may alternatively be made by recombinant means or by cleavage from a longer polypeptide. The composition of a peptide may be confirmed by amino acid analysis or sequencing.

[0129] The variants of the peptides according to the present invention may be (i) one in which one or more of the amino acid residues are substituted with a conserved or non-conserved amino acid residue and such substituted amino acid residue may or may not be one encoded by the genetic code, (ii) one in which there are one or more modified amino acid residues, e.g., residues that are modified by the attachment of substituent groups, (iii) one in which the peptide is an alternative splice variant of the peptide of the present invention, (iv) fragments of the peptides and/or (v) one in which the peptide is fused with another peptide, such as a leader or secretory sequence or a sequence which is employed for purification (for example, His-tag) or for detection (for example, Sv5 epitope tag). The fragments include peptides generated via proteolytic cleavage (including multi-site proteolysis) of an original sequence. Variants may be post-translationally, or chemically modified. Such variants are deemed to be within the scope of those skilled in the art from the teaching herein.

[0130] As known in the art the “similarity” between two peptides is determined by comparing the amino acid sequence and its conserved amino acid substitutes of one polypeptide to a sequence of a second polypeptide. Variants are defined to include peptide sequences different from the original sequence. In one embodiment, variants are different from the original sequence in less than 40% of residues per segment of interest different from the original sequence in less than 25% of residues per segment of interest, different by less than 10% of residues per segment of interest, or different from the original protein sequence in just a few residues per segment of interest and at the same time sufficiently homologous to the original sequence to preserve the functionality of the original sequence and/or the ability to stimulate the differentiation of a stem cell into the osteoblast lineage. The present invention includes amino acid sequences that are at least 60%, 65%, 70%, 72%, 74%, 76%, 78%, 80%, 90%, or 95% similar or identical to the original amino acid sequence. The degree of identity between two peptides is determined using computer algorithms and methods that are widely known for the persons skilled in the art. The identity between two amino acid sequences may be determined by using the BLASTP algorithm [BLAST Manual, Altschul, S., et al., NCBI NLM NIH Bethesda, Md. 20894, Altschul, S., et al., J. Mol. Biol. 215: 403-410 (1990)].

[0131] The peptides of the invention can be post-translationally modified. For example, post-translational modifications that fall within the scope of the present invention include signal peptide cleavage, glycosylation, acetylation, isoprenylation, proteolysis, myristoylation, protein folding and proteolytic processing, etc. Some modifications or processing events require introduction of additional biological machinery. For example, processing events, such as signal peptide cleavage and core glycosylation, are examined by adding canine microsomal membranes or Xenopus egg extracts (U.S. Pat. No. 6,103,489) to a standard translation reaction.

[0132] The peptides of the invention may include unnatural amino acids formed by post-translational modification or by introducing unnatural amino acids during translation. A variety of approaches are available for introducing unnatural amino acids during protein translation.

[0133] A peptide or protein of the invention may be phosphorylated using conventional methods such as the method described in Reedijk et al. (The EMBO Journal 11(4):1365, 1992).

[0134] Cyclic derivatives of the peptides of the invention are also part of the present invention. Cyclization may allow the peptide to assume a more favorable conformation for association with other molecules. Cyclization may be achieved using techniques known in the art. For example, disulfide bonds may be formed between two appropriately spaced components having free sulfhydryl groups, or an amide bond may be formed between an amino group of one component and a carboxyl group of another component. Cyclization may also be achieved using an azobenzene-containing amino acid as described by Ulysse, L., et al., J. Am. Chem. Soc. 1995, 117, 8466-8467. The components that form the bonds may be side chains of amino acids, non-amino acid components or a combination of the two. In an embodiment of the invention, cyclic peptides may comprise a beta-turn in the right position. Beta-turns may be introduced into the peptides of the invention by adding the amino acids Pro-Gly at the right position.

[0135] It may be desirable to produce a cyclic peptide which is more flexible than the cyclic peptides containing peptide bond linkages as described above. A more flexible peptide may be prepared by introducing cysteines at the right and left position of the peptide and forming a disulphide bridge between the two cysteines. The two cysteines are arranged so as not to deform the beta-sheet and turn. The peptide is more flexible as a result of the length of the disulfide linkage and the smaller number of hydrogen bonds in the beta-sheet portion. The relative flexibility of a cyclic peptide can be determined by molecular dynamics simulations.

[0136] The invention also relates to peptides comprising an IN-Cas9 peptide fused to, or integrated into, a target protein, and/or a targeting domain capable of directing the chimeric protein to a desired cellular component or cell type or tissue. The chimeric proteins may also contain additional amino acid sequences or domains. The chimeric proteins are recombinant in the sense that the various components are from different sources, and as such are not found together in nature (i.e., are heterologous).

[0137] In one embodiment, the targeting domain can be a membrane spanning domain, a membrane binding domain, or a sequence directing the protein to associate with for example vesicles or with the nucleus. In one embodiment, the targeting domain can target a peptide to a particular cell type or tissue. For example, the targeting domain can be a cell surface ligand or an antibody against cell surface antigens of a target tissue. A targeting domain may target the peptide of the invention to a cellular component.

[0138] A peptide of the invention may be synthesized by conventional techniques. For example, the peptides or chimeric proteins may be synthesized by chemical synthesis using solid phase peptide synthesis. These methods employ either solid or solution phase synthesis methods (see for example, J. M. Stewart, and J. D. Young, Solid Phase Peptide Synthesis, 2^{nd} Ed., Pierce Chemical Co., Rockford Ill. (1984) and G. Barany and R. B. Merrifield, The Peptides: Analysis Synthesis, Biology editors E. Gross and J. Meienhofer Vol. 2 Academic Press, New York, 1980, pp. 3-254 for solid phase synthesis techniques; and M Bodansky, Principles of Peptide Synthesis, Springer-Verlag, Berlin 1984, and E. Gross and J. Meienhofer, Eds., The Peptides: Analysis, Synthesis, Biology, suprs, Vol 1, for classical solution synthesis). By way of example, a peptide of the invention may be synthesized using 9-fluorenyl methoxycarbonyl (Fmoc) solid phase chemistry with direct incorporation of phosphothreonine as the N-fluorenylmethoxy-carbonyl-O-benzyl-L-phosphothreonine derivative.

[0139] N-terminal or C-terminal fusion proteins comprising a peptide or chimeric protein of the invention conjugated with other molecules may be prepared by fusing, through recombinant techniques, the N-terminal or C-terminal of the peptide or chimeric protein, and the sequence of a selected protein or selectable marker with a desired biological function. The resultant fusion proteins contain the IN-Cas9 peptide fused to the selected protein or marker protein as described herein. Examples of proteins which may be used to prepare fusion proteins include immunoglobulins, glutathione-S-transferase (GST), hemagglutinin (HA), and truncated myc.

[0140] Peptides of the invention may be developed using a biological expression system. The use of these systems allows the production of large libraries of random peptide sequences and the screening of these libraries for peptide sequences that bind to particular proteins. Libraries may be produced by cloning synthetic DNA that encodes random peptide sequences into appropriate expression vectors (see Christian et al 1992, J. Mol. Biol. 227:711; Devlin et al, 1990 Science 249:404; Cwirla et al 1990, Proc. Natl. Acad, Sci. USA, 87:6378). Libraries may also be constructed by concurrent synthesis of overlapping peptides (see U.S. Pat. No. 4,708,871).

[0141] The peptides and chimeric proteins of the invention may be converted into pharmaceutical salts by reacting with inorganic acids such as hydrochloric acid, sulfuric acid, hydrobromic acid, phosphoric acid, etc., or organic acids such as formic acid, acetic acid, propionic acid, glycolic acid, lactic acid, pyruvic acid, oxalic acid, succinic acid, malic acid, tartaric acid, citric acid, benzoic acid, salicylic acid, benezenesulfonic acid, and toluenesulfonic acids.

### Nucleic Acids

[0142] In one embodiment, the present invention a nucleic acid molecule encoding a fusion protein. In one embodiment, the nucleic acid molecule comprises a first nucleic acid sequence encoding an editing protein; and a second nucleic acid sequence encoding a nuclear localization signal (NLS).

[0143] In one embodiment, the editing protein includes, but is not limited to, a CRISPR-associated (Cas) protein, transcription activator-like effector-based nuclease (TALEN) protein, a zinc finger nuclease (ZFN) protein, and a protein having a DNA binding domain. In one embodiment, the editing protein is a Cas protein.

[0144] Non-limiting examples of Cas proteins include Cas1, Cas1B, Cas2, Cas3, Cas4, Cas5, Cas6, Cas7, Cas8, Cas9, Cas10, Csy1, Csy2, Csy3, Cse1, Cse2, Csc1, Csc2, Csa5, Csn2. Csm2, Csm3, Csm4, Csm5, Csm6, Cmr1, Cmr3, Cmr4, Cmr5, Cmr6, Csb1, Csb2, Csb3, Csx17, Csx14, Csx10, Csx16, CsaX, Csx3, Csx1, Csx15, Csf1, Csf2, Csf3, Csf4, SpCas9, StCas9, NmCas9, SaCas9, CjCas9, CjCas9, AsCpf1, LbCpf1, FnCpf1, VRER SpCas9, VQR SpCas9, xCas9 3.7, homologs thereof, orthologs thereof, or modified versions thereof. In some embodiments, the Cas protein has DNA or RNA cleavage activity. In some embodiments, the Cas protein directs cleavage of one or both strands of a nucleic acid molecule at the location of a target sequence, such as within the target sequence and/or within the complement of the target sequence. In some embodiments, the Cas protein directs cleavage of one or both strands within about 1, 2, 3, 4, 5, 6, 7, 8, 9, 10, 15, 20, 25, 50, 100, 200, 500, or more base pairs from the first or last nucleotide of a target sequence. In one embodiment, the Cas protein is Cas9, Cas13, or Cpf1. In one embodiment, Cas protein is Cas9. In one embodiment, Cas protein is catalytically deficient (dCas).

[0145] In one embodiment, the first nucleic acid sequence encoding a Cas protein comprises a nucleic acid sequence encoding an amino acid sequence at least 70%, at least 71%, at least 72%, at least 73%, at least 74%, at least 75%, at least 76%, at least 77%, at least 78%, at least 79%, 80%, at least 81%, at least 82%, at least 83%, at least 84%, at least 85%, at least 86%, at least 87%, at least 88%, at least 89%, 90%, at least 91%, at least 92%, at least 93%, at least 94%, at least 95%, at least 96%, at least 97%, at least 98%, or at least 99% identical to one of SEQ ID NOs:41-46. In one embodiment, the first nucleic acid sequence encoding a Cas protein comprises a nucleic acid sequence encoding one of SEQ ID NOs:41-46.

[0146] In one embodiment, the first nucleic acid sequence encoding a Cas protein comprises a nucleic acid sequence at least 70%, at least 71%, at least 72%, at least 73%, at least 74%, at least 75%, at least 76%, at least 77%, at least 78%, at least 79%, 80%, at least 81%, at least 82%, at least 83%, at least 84%, at least 85%, at least 86%, at least 87%, at least 88%, at least 89%, 90%, at least 91%, at least 92%, at least 93%, at least 94%, at least 95%, at least 96%, at least 97%, at least 98%, or at least 99% identical to one of SEQ ID NOs:139-144. In one embodiment, the first nucleic acid sequence encoding a Cas protein comprises a nucleic acid sequence of one of SEQ ID NOs:139-144.

[0147] In one embodiment, the second nucleic acid sequence encodes a nuclear localization signal (NLS). In one embodiment, the NLS is a retrotransposon NLS. In one embodiment, the NLS is derived from yeast GAL4, SKI3, L29 or histone H2B proteins, polyoma virus large T protein, VP1 or VP2 capsid protein, SV40 VP1 or VP2 capsid protein, Adenovirus E1 a or DBP protein, influenza virus NS1 protein, hepatitis vims core antigen or the mammalian lamin, c-myc, max, c-myb, p53, c-erbA, jun, Tax, steroid receptor or Mx proteins, Nucleoplasmin (NPM2), Nucleophosmin (NPM1), or simian vims 40 (“SV40”) T-antigen. In one embodiment, the NLS is a Ty1 or Ty1-derived NLS, a Ty2 or Ty2-derived NLS or a MAK11 or MAK11-derived NLS. In one embodiment, the Ty1 NLS comprises an amino acid sequence of SEQ ID NO:51. In one embodiment, the Ty2 NLS comprises an amino acid sequence of SEQ ID NO:254. In one embodiment, the MAK11 NLS comprises an amino acid sequence of SEQ ID NO:256.

[0148] In one embodiment, the NLS is a Ty1-like NLS. For example, in one embodiment, the Ty-like NLS comprises KKRX motif. In one embodiment, the Ty1-like NLS comprises KKRX motif at the N-terminal end. In one embodiment, the Ty1-like NLS comprises KKR motif In one embodiment, the Ty1-like NLS comprises KKR motif at the C-terminal end. In one embodiment, the Ty1-like NLS comprises a KKRX and a KKR motif. In one embodiment, the Ty1-like NLS comprises a KKRX at the N-terminal end and a KKR motif at the C-terminal end. In one embodiment, the Ty1-like NLS comprises at least 20 amino acids. In one embodiment, the Ty1-like NLS comprises between 20 and 40 amino acids.

[0149] In one embodiment, the retrotransposon NLS increases nuclear localization. In one embodiment, the retrotransposon NLS increases nuclear localization significantly more compared to non-retrotransposon NLS.

[0150] In one embodiment, second nucleic acid sequence encoding a NLS comprises a nucleic acid sequence encoding an amino acid sequence at least 70%, at least 71%, at least 72%, at least 73%, at least 74%, at least 75%, at least 76%, at least 77%, at least 78%, at least 79%, 80%, at least 81%, at least 82%, at least 83%, at least 84%, at least 85%, at least 86%, at least 87%, at least 88%, at least 89%, 90%, at least 91%, at least 92%, at least 93%, at least 94%, at least 95%, at least 96%, at least 97%, at least 98%, or at least 99% identical to one of SEQ ID NOs:47-56, 254-257, and 275-887. In one embodiment, second nucleic acid sequence encoding a NLS comprises a nucleic acid sequence encoding one of SEQ ID NOs:47-56, 254-257, and 275-887.

[0151] In one embodiment, second nucleic acid sequence encoding a NLS comprises a nucleic acid sequence at least 70%, at least 71%, at least 72%, at least 73%, at least 74%, at least 75%, at least 76%, at least 77%, at least 78%, at least 79%, 80%, at least 81%, at least 82%, at least 83%, at least 84%, at least 85%, at least 86%, at least 87%, at least 88%, at least 89%, 90%, at least 91%, at least 92%, at least 93%, at least 94%, at least 95%, at least 96%, at least 97%, at least 98%, or at least 99% identical to one of SEQ ID NOs:145-154. In one embodiment, second nucleic acid sequence encoding a NLS comprises a nucleic acid sequence of one of SEQ ID NOs:145-154.

[0152] In one embodiment, the nucleic acid molecule encodes a fusion protein comprising a sequence at least 70%, at least 71%, at least 72%, at least 73%, at least 74%, at least 75%, at least 76%, at least 77%, at least 78%, at least 79%, 80%, at least 81%, at least 82%, at least 83%, at least 84%, at least 85%, at least 86%, at least 87%, at least 88%, at least 89%, 90%, at least 91%, at least 92%, at least 93%, at least 94%, at least 95%, at least 96%, at least 97%, at least 98%, or at least 99% identical to one of SEQ ID NOs:249-250. In one embodiment, the nucleic acid molecule encodes a fusion protein comprising a sequence of one of SEQ ID NOs:249-250.

[0153] In one embodiment, the nucleic acid molecule comprises; a first nucleic acid sequence encoding an editing protein; a second nucleic acid sequence encoding a nuclear localization signal (NLS); and a third nucleic acid sequence encoding a retroviral integrase (IN) or a fragment thereof.

[0154] In one embodiment, the retroviral IN is human immunodeficiency virus (HIV) IN, Rous sarcoma virus (RSV) IN, Mouse mammary tumor virus (MMTV) IN, Moloney murine leukemia virus (MoLV) IN, bovine leukemia virus (BLV) IN, Human T-lymphotropic virus (HTLV) IN, avian sarcoma leukosis virus (ASLV) IN, feline leukemia virus (FLV) IN, xenotropic murine leukemia virus-related virus (XMLV) IN, simian immunodeficiency virus (SIV) IN, feline immunodeficiency virus (FIV) IN, equine infectious anemia virus (EIAV) IN, Prototype foamy virus (PFV) IN, simian foamy virus (SFV) IN, human foamy virus (HFV) IN, walleye dermal sarcoma virus (WDSV) IN, or bovine immunodeficiency virus (BIV) IN.

[0155] In one embodiment, the retroviral IN is HIV IN. In one embodiment, the HIV IN comprises one or more amino acid substitutions, wherein the substitution improves catalytic activity, improves solubility, or increases interaction with one or more host cellular cofactors. In one embodiment, HIV IN comprises one or more, two or more, three or more, four or more, five or more, six or more, seven or more, eight or more or nine amino acid substitutions selected from the group consisting of E85G, E85F, D116N, F185K, C280S, T97A, Y134R, G140S, and Q148H. In one embodiment, HIV IN comprises amino acid substitutions F185K and C280S. In one embodiment, HIV IN comprises amino acid substitutions T97A and Y134R. In one embodiment, HIV IN comprises amino acid substitutions G140S and Q148H.

[0156] In one embodiment, the retroviral IN fragment comprises the IN N-terminal domain (NTD), and the IN catalytic core domain (CCD). In one embodiment, the retroviral IN fragment comprises the IN CCD and the IN C-terminal domain (CTD). In one embodiment, the retroviral IN fragment comprises the IN NTD. In one embodiment, the retroviral IN fragment comprises the IN CCD. In one embodiment, the retroviral IN fragment comprises the IN CTD. The in one embodiment, the fragments of the integrase retain at least one activity of the full length integrase. Retroviral integrase functions and fragments are known in the art and can be found in, for example, Li, et al., 2011, Virology 411:194-205, and Maertens et al., 2010, Nature 468:326-29, which are incorporated by reference herein.

[0157] In one embodiment, the third nucleic acid sequence encoding a retroviral IN comprises a nucleic acid sequence encoding an amino acid sequence at least 70%, at least 71%, at least 72%, at least 73%, at least 74%, at least 75%, at least 76%, at least 77%, at least 78%, at least 79%, 80%, at least 81%, at least 82%, at least 83%, at least 84%, at least 85%, at least 86%, at least 87%, at least 88%, at least 89%, 90%, at least 91%, at least 92%, at least 93%, at least 94%, at least 95%, at least 96%, at least 97%, at least 98%, or at least 99% identical to one of SEQ ID NOs:1-40. In one embodiment, the third nucleic acid sequence encoding a retroviral IN comprises a nucleic acid sequence encoding one of SEQ ID NOs:1-40.

[0158] In one embodiment, the third nucleic acid sequence encoding a retroviral IN comprises a nucleic acid sequence at least at least 70%, at least 71%, at least 72%, at least 73%, at least 74%, at least 75%, at least 76%, at least 77%, at least 78%, at least 79%, 80%, at least 81%, at least 82%, at least 83%, at least 84%, at least 85%, at least 86%, at least 87%, at least 88%, at least 89%, 90%, at least 91%, at least 92%, at least 93%, at least 94%, at least 95%, at least 96%, at least 97%, at least 98%, or at least 99% identical to one of SEQ ID NOs:99-138. In one embodiment, the third nucleic acid sequence encoding a retroviral IN comprises a nucleic acid sequence of one of SEQ ID NOs:99-138.

[0159] In one embodiment, the editing protein includes, but is not limited to, a CRISPR-associated (Cas) protein, transcription activator-like effector-based nuclease (TALEN) protein, a zinc finger nuclease (ZFN) protein, and a DNA-binding protein. In one embodiment, the editing protein is a Cas protein. In one embodiment, the Cas protein is Cas9, Cas13, or Cpf1. In one embodiment, the Cas protein is catalytically deficient (dCas).

[0160] In one embodiment, the first nucleic acid sequence encodes a Cas protein. In one embodiment, the first nucleic acid sequence encoding a Cas protein comprises a nucleic acid sequence encoding an amino acid sequence at least 70%, at least 71%, at least 72%, at least 73%, at least 74%, at least 75%, at least 76%, at least 77%, at least 78%, at least 79%, 80%, at least 81%, at least 82%, at least 83%, at least 84%, at least 85%, at least 86%, at least 87%, at least 88%, at least 89%, 90%, at least 91%, at least 92%, at least 93%, at least 94%, at least 95%, at least 96%, at least 97%, at least 98%, or at least 99% identical to one of SEQ ID NOs:41-46. In one embodiment, the first nucleic acid sequence encoding a Cas protein comprises a nucleic acid sequence encoding one of SEQ ID NOs:41-46.

[0161] In one embodiment, the first nucleic acid sequence encoding a Cas protein comprises a nucleic acid sequence at least 70%, at least 71%, at least 72%, at least 73%, at least 74%, at least 75%, at least 76%, at least 77%, at least 78%, at least 79%, 80%, at least 81%, at least 82%, at least 83%, at least 84%, at least 85%, at least 86%, at least 87%, at least 88%, at least 89%, 90%, at least 91%, at least 92%, at least 93%, at least 94%, at least 95%, at least 96%, at least 97%, at least 98%, or at least 99% identical to one of SEQ ID NOs:139-144. In one embodiment, the first nucleic acid sequence encoding a Cas protein comprises a nucleic acid sequence of one of SEQ ID NOs:139-144.

[0162] In one embodiment, the second nucleic acid sequence encodes a nuclear localization signal (NLS). In one embodiment, the NLS is a retrotransposon NLS. In one embodiment, the NLS is derived from yeast GAL4, SKI3, L29 or histone H2B proteins, polyoma virus large T protein, VP1 or VP2 capsid protein, SV40 VP1 or VP2 capsid protein, Adenovirus E1 a or DBP protein, influenza virus NS1 protein, hepatitis vims core antigen or the mammalian lamin, c-myc, max, c-myb, p53, c-erbA, jun, Tax, steroid receptor or Mx proteins, Nucleoplasmin (NPM2), Nucleophosmin (NPM1), or simian vims 40 (“SV40”) T-antigen. In one embodiment, the NLS is a Ty1 or Ty1-derived NLS, a Ty2 or Ty2-derived NLS or a MAK11 or MAK11-derived NLS. In one embodiment, the Ty1 NLS comprises an amino acid sequence of SEQ ID NO:51. In one embodiment, the Ty2 NLS comprises an amino acid sequence of SEQ ID NO:254. In one embodiment, the MAK11 NLS comprises an amino acid sequence of SEQ ID NO:256.

[0163] In one embodiment, the retrotransposon NLS increases nuclear localization. In one embodiment, the retrotransposon NLS increases nuclear localization significantly more compared to non-retrotransposon NLS.

[0164] In one embodiment, second nucleic acid sequence encoding a NLS comprises a nucleic acid sequence encoding an amino acid sequence at least 70%, at least 71%, at least 72%, at least 73%, at least 74%, at least 75%, at least 76%, at least 77%, at least 78%, at least 79%, 80%, at least 81%, at least 82%, at least 83%, at least 84%, at least 85%, at least 86%, at least 87%, at least 88%, at least 89%, 90%, at least 91%, at least 92%, at least 93%, at least 94%, at least 95%, at least 96%, at least 97%, at least 98%, or at least 99% identical to one of SEQ ID NOs:47-56, 254-257 and 275-87. In one embodiment, second nucleic acid sequence encoding a NLS comprises a nucleic acid sequence encoding one of SEQ ID NOs: 47-56, 254-257 and 275-887.

[0165] In one embodiment, second nucleic acid sequence encoding a NLS comprises a nucleic acid sequence at least 70%, at least 71%, at least 72%, at least 73%, at least 74%, at least 75%, at least 76%, at least 77%, at least 78%, at least 79%, 80%, at least 81%, at least 82%, at least 83%, at least 84%, at least 85%, at least 86%, at least 87%, at least 88%, at least 89%, 90%, at least 91%, at least 92%, at least 93%, at least 94%, at least 95%, at least 96%, at least 97%, at least 98%, or at least 99% identical to one of SEQ ID NOs:145-154. In one embodiment, second nucleic acid sequence encoding a NLS comprises a nucleic acid sequence of one of SEQ ID NOs:145-154.

[0166] In one embodiment, the nucleic acid molecule encodes a fusion protein comprising a sequence at least 70%, at least 71%, at least 72%, at least 73%, at least 74%, at least 75%, at least 76%, at least 77%, at least 78%, at least 79%, 80%, at least 81%, at least 82%, at least 83%, at least 84%, at least 85%, at least 86%, at least 87%, at least 88%, at least 89%, 90%, at least 91%, at least 92%, at least 93%, at least 94%, at least 95%, at least 96%, at least 97%, at least 98%, or at least 99% identical to one of SEQ ID NOs:57-98. In one embodiment, the nucleic acid molecule encodes a fusion protein comprising a sequence of one of SEQ ID NOs:57-98.

[0167] In one embodiment, the nucleic acid molecule comprises a nucleic acid sequence at least 70%, at least 71%, at least 72%, at least 73%, at least 74%, at least 75%, at least 76%, at least 77%, at least 78%, at least 79%, 80%, at least 81%, at least 82%, at least 83%, at least 84%, at least 85%, at least 86%, at least 87%, at least 88%, at least 89%, 90%, at least 91%, at least 92%, at least 93%, at least 94%, at least 95%, at least 96%, at least 97%, at least 98%, or at least 99% identical to one of SEQ ID NOs:155-196. In one embodiment, the nucleic acid molecule comprises a nucleic acid sequence of one of SEQ ID NOs:155-196.

[0168] The isolated nucleic acid sequence encoding a fusion protein can be obtained using any of the many recombinant methods known in the art, such as, for example by screening libraries from cells expressing the gene, by deriving the gene from a vector known to include the same, or by isolating directly from cells and tissues containing the same, using standard techniques. Alternatively, the gene of interest can be produced synthetically, rather than cloned.

[0169] The isolated nucleic acid may comprise any type of nucleic acid, including, but not limited to DNA and RNA. For example, in one embodiment, the composition comprises an isolated DNA molecule, including for example, an isolated cDNA molecule, encoding a fusion protein of the invention. In one embodiment, the composition comprises an isolated RNA molecule encoding a fusion protein of the invention, or a functional fragment thereof.

[0170] The nucleic acid molecules of the present invention can be modified to improve stability in serum or in growth medium for cell cultures. Modifications can be added to enhance stability, functionality, and/or specificity and to minimize immunostimulatory properties of the nucleic acid molecule of the invention. For example, in order to enhance the stability, the 3′-residues may be stabilized against degradation, e.g., they may be selected such that they consist of purine nucleotides, particularly adenosine or guanosine nucleotides. Alternatively, substitution of pyrimidine nucleotides by modified analogues, e.g., substitution of uridine by 2′-deoxythymidine is tolerated and does not affect function of the molecule.

[0171] In one embodiment of the present invention the nucleic acid molecule may contain at least one modified nucleotide analogue. For example, the ends may be stabilized by incorporating modified nucleotide analogues.

[0172] Non-limiting examples of nucleotide analogues include sugar- and/or backbone-modified ribonucleotides (i.e., include modifications to the phosphate-sugar backbone). For example, the phosphodiester linkages of natural RNA may be modified to include at least one of a nitrogen or sulfur heteroatom. In exemplary backbone-modified ribonucleotides the phosphoester group connecting to adjacent ribonucleotides is replaced by a modified group, e.g., of phosphothioate group. In exemplary sugar-modified ribonucleotides, the 2′ OH-group is replaced by a group selected from H, OR, R, halo, SH, SR, NH₂, NHR, NR₂ or ON, wherein R is C₁-C₆ alkyl, alkenyl or alkynyl and halo is F, Cl, Br or I.

[0173] Other examples of modifications are nucleobase-modified ribonucleotides, i.e., ribonucleotides, containing at least one non-naturally occurring nucleobase instead of a naturally occurring nucleobase. Bases may be modified to block the activity of adenosine deaminase. Exemplary modified nucleobases include, but are not limited to, uridine and/or cytidine modified at the 5-position, e.g., 5-(2-amino)propyl uridine, 5-bromo uridine; adenosine and/or guanosines modified at the 8 position, e.g., 8-bromo guanosine; deaza nucleotides, e.g., 7-deaza-adenosine; O- and N-alkylated nucleotides, e.g., N6-methyl adenosine are suitable. It should be noted that the above modifications may be combined.

[0174] In some instances, the nucleic acid molecule comprises at least one of the following chemical modifications: 2′-H, 2′-O-methyl, or 2′-OH modification of one or more nucleotides. In certain embodiments, a nucleic acid molecule of the invention can have enhanced resistance to nucleases. For increased nuclease resistance, a nucleic acid molecule, can include, for example, 2′-modified ribose units and/or phosphorothioate linkages. For example, the 2′ hydroxyl group (OH) can be modified or replaced with a number of different “oxy” or “deoxy” substituents. For increased nuclease resistance the nucleic acid molecules of the invention can include 2′-O-methyl, 2′-fluorine, 2′-O-methoxyethyl, 2′-O-aminopropyl, 2′-amino, and/or phosphorothioate linkages. Inclusion of locked nucleic acids (LNA), ethylene nucleic acids (ENA), e.g., 2′-4′-ethylene-bridged nucleic acids, and certain nucleobase modifications such as 2-amino-A, 2-thio (e.g., 2-thio-U), G-clamp modifications, can also increase binding affinity to a target.

[0175] In one embodiment, the nucleic acid molecule includes a 2′-modified nucleotide, e.g., a 2′-deoxy, 2′-deoxy-2′-fluoro, 2′-O-methyl, 2′-O-methoxyethyl (2′-O-MOE), 2′-O-aminopropyl (2′-O-AP), 2′-O-dimethylaminoethyl (2′-O-DMAOE), 2′-O-dimethylaminopropyl (2′-O-DMAP), 2′-O-dimethylaminoethyloxyethyl (2′-O-DMAEOE), or 2′-O—N-methylacetamido (2′-O-NMA). In one embodiment, the nucleic acid molecule includes at least one 2′-O-methyl-modified nucleotide, and in some embodiments, all of the nucleotides of the nucleic acid molecule include a 2′-O-methyl modification.

[0176] In certain embodiments, the nucleic acid molecule of the invention has one or more of the following properties:

[0177] Nucleic acid agents discussed herein include otherwise unmodified RNA and DNA as well as RNA and DNA that have been modified, e.g., to improve efficacy, and polymers of nucleoside surrogates. Unmodified RNA refers to a molecule in which the components of the nucleic acid, namely sugars, bases, and phosphate moieties, are the same or essentially the same as that which occur in nature, or as occur naturally in the human body. The art has referred to rare or unusual, but naturally occurring, RNAs as modified RNAs, see, e.g., Limbach et al. (Nucleic Acids Res., 1994, 22:2183-2196). Such rare or unusual RNAs, often termed modified RNAs, are typically the result of a post-transcriptional modification and are within the term unmodified RNA as used herein. Modified RNA, as used herein, refers to a molecule in which one or more of the components of the nucleic acid, namely sugars, bases, and phosphate moieties, are different from that which occur in nature, or different from that which occurs in the human body. While they are referred to as “modified RNAs” they will of course, because of the modification, include molecules that are not, strictly speaking, RNAs. Nucleoside surrogates are molecules in which the ribophosphate backbone is replaced with a non-ribophosphate construct that allows the bases to be presented in the correct spatial relationship such that hybridization is substantially similar to what is seen with a ribophosphate backbone, e.g., non-charged mimics of the ribophosphate backbone.

[0178] Modifications of the nucleic acid of the invention may be present at one or more of, a phosphate group, a sugar group, backbone, N-terminus, C-terminus, or nucleobase.

[0179] The present invention also includes a vector in which the isolated nucleic acid of the present invention is inserted. The art is replete with suitable vectors that are useful in the present invention.

[0180] In brief summary, the expression of natural or synthetic nucleic acids encoding a fusion protein of the invention is typically achieved by operably linking a nucleic acid encoding the fusion protein of the invention or portions thereof to a promoter, and incorporating the construct into an expression vector. The vectors to be used are suitable for replication and, optionally, integration in eukaryotic cells. Typical vectors contain transcription and translation terminators, initiation sequences, and promoters useful for regulation of the expression of the desired nucleic acid sequence.

[0181] The vectors of the present invention may also be used for nucleic acid immunization and gene therapy, using standard gene delivery protocols. Methods for gene delivery are known in the art. See, e.g., U.S. Pat. Nos. 5,399,346, 5,580,859, 5,589,466, incorporated by reference herein in their entireties. In another embodiment, the invention provides a gene therapy vector.

[0182] The isolated nucleic acid of the invention can be cloned into a number of types of vectors. For example, the nucleic acid can be cloned into a vector including, but not limited to a plasmid, a phagemid, a phage derivative, an animal virus, and a cosmid. Vectors of particular interest include expression vectors, replication vectors, probe generation vectors, and sequencing vectors.

[0183] Further, the vector may be provided to a cell in the form of a viral vector. Viral vector technology is well known in the art and is described, for example, in Sambrook et al. (2012, Molecular Cloning: A Laboratory Manual, Cold Spring Harbor Laboratory, New York), and in other virology and molecular biology manuals. Viruses, which are useful as vectors include, but are not limited to, retroviruses, adenoviruses, adeno-associated viruses, herpes viruses, and lentiviruses. In general, a suitable vector contains an origin of replication functional in at least one organism, a promoter sequence, convenient restriction endonuclease sites, and one or more selectable markers, (e.g., WO 01/96584; WO 01/29058; and U.S. Pat. No. 6,326,193).

### Delivery Systems and Methods

[0184] In one aspect, the invention relates to the development of novel lentiviral packaging and delivery systems. The lentiviral particle delivers the viral enzymes as proteins. In this fashion, lentiviral enzymes are short lived, thus limiting the potential for off-target editing due to long term expression though the entire life of the cell. The incorporation of editing components, or traditional CRISPR-Cas editing components as proteins in lentiviral particles is advantageous, given that their required activity is only required for a short period of time. Thus, in one embodiment, the invention provides a lentiviral delivery system and methods of delivering the compositions of the invention, editing genetic material, and nucleic acid delivery using lentiviral delivery systems.

[0185] For example, in one aspect, the delivery system comprises (1) an packaging plasmid (2) a transfer plasmid, and (3) an envelope plasmid. In one embodiment, the packaging plasmid comprises a nucleic acid sequence encoding a modified gag-pol polyprotein. In one embodiment, the modified gag-pol polyprotein comprises integrase fused to a editing protein. In one embodiment, the modified gag-pol polyprotein comprises integrase fused to a Cas protein. In one embodiment, the modified gag-pol polyprotein comprises integrase fused to a catalytically dead Cas protein (dCas). In one embodiment, the packaging plasmid further comprises a sequence encoding a sgRNA sequence.

[0186] In one embodiment, the transfer plasmid comprises a donor sequence. The donor sequence can be any nucleic acid sequence to be delivered to a genome. In one embodiment, the transfer plasmid comprises a 5′ long terminal repeat (LTR) sequence and a 3′ LTR sequence. In one embodiment, the 3′ LTR is a Self-inactivating (SIN) LTR. Thus, in one embodiment, the 5′ LTR comprises a U3 sequence, an R sequence and a U5 sequence and the 3′ LTR comprises an R sequence and a U5 sequence, but does not comprise a U3 sequence. In one embodiment, the 5′ LTR and the 3′ LTR are specific to the Integrase in the Insctriptr packaging plasmid.

[0187] In one embodiment, the envelope plasmid comprises a nucleic acid sequence encoding an envelope protein. In one embodiment, the envelope plasmid comprises a nucleic acid sequence encoding an HIV envelope protein. In one embodiment, the envelope plasmid comprises a nucleic acid sequence encoding a vesicular stomatitis virus g-protein envelope protein. In one embodiment, the envelope protein can be selected based on the desired cell type.

[0188] In one embodiment, the packaging plasmid, transfer plasmid, and envelope plasmid are introduced into a cell. In one embodiment, the cell transcribes and translates the nucleic acid sequence encoding the modified gag-pol protein to produce the modified gag-pol protein. In one embodiment, the cell transcribes the nucleic acid sequence encoding the sgRNA. In one embodiment, the sgRNA binds to the Integrase-Cas fusion protein. In one embodiment, the cell transcribes and translates the nucleic acid sequence encoding the envelope protein to produce the envelope protein. In one embodiment, the cell transcribes the donor sequence to provide a Donor Sequence RNA molecule. In one embodiment, the modified gag-pol protein, which is bound to the sgRNA, envelope polyprotein, and donor sequence RNA are packaged into a viral particle. In one embodiment, the viral particles are collected from the cell media. In one embodiment, the viral particles transduce a target cell, wherein the sgRNA binds a target region of the cellular DNA thereby targeting the IN-Cas9 fusion protein, and the Integrase catalyzes the integration of the donor sequence into the cellular DNA.

[0189] In one aspect, the delivery system comprises (1) a packaging plasmid (2) a transfer plasmid, (3) an envelope plasmid, and (4) a VPR-IN-dCas plasmid. In one embodiment, the packaging plasmid comprises a nucleic acid sequence encoding a gag-pol polyprotein. In one embodiment, the gag-pol polyprotein comprises catalytically dead integrase. In one embodiment, the gag-pol polyprotein comprises the D116N integrase mutation.

[0190] In one embodiment, the transfer plasmid comprises a donor sequence. The donor sequence can be any nucleic acid sequence to be delivered to a genome. In one embodiment, the transfer plasmid comprises a 5′ long terminal repeat (LTR) sequence and a 3′ LTR sequence. In one embodiment, the 3′ LTR is a Self-inactivating (SIN) LTR. Thus, in one embodiment, the 5′ LTR comprises a U3 sequence, an R sequence and a U5 sequence and the 3′ LTR comprises an R sequence and a U5 sequence, but does not comprise a U3 sequence. In one embodiment, the 5′ LTR and the 3′ LTR are specific to the integrase in the VPR-IN-dCas packaging plasmid.

[0191] In one embodiment, the envelope plasmid comprises a nucleic acid sequence encoding an envelope protein. In one embodiment, the envelope plasmid comprises a nucleic acid sequence encoding an HIV envelope protein. In one embodiment, the envelope plasmid comprises a nucleic acid sequence encoding a vesicular stomatitis virus g-protein (VSV-g) envelope protein. In one embodiment, the envelope protein can be selected based on the desired cell type.

[0192] In one embodiment, the VPR-IN-dCas plasmid comprises a nucleic acid sequence encoding a fusion protein comprising VPR, integrase, and an editing protein. In one embodiment, the VPR-IN-dCas plasmid comprises a nucleic acid sequence encoding a fusion protein comprising VPR, integrase and a Cas protein. In one embodiment, the VPR-IN-dCas plasmid comprises a nucleic acid sequence encoding a fusion protein comprising VPR, integrase and a dCas protein. In one embodiment, the fusion protein comprises a protease cleavage site between VPR and integrase. In one embodiment, the VPR-IN-dCas plasmid packaging plasmid further comprises a sequence encoding a sgRNA sequence.

[0193] In one embodiment, the packaging plasmid, transfer plasmid, envelope plasmid, and VPR-IN-dCas plasmid are introduced into a cell. In one embodiment, the cell transcribes and translates the nucleic acid sequence encoding the gag-pol protein to produce the gag-pol polyprotein. In one embodiment, the cell transcribes and translates the nucleic acid sequence encoding the envelope protein to produce the envelope protein. In one embodiment, the cell transcribes the donor sequence to provide a Donor Sequence RNA molecule. In one embodiment, the cell transcribes and translates the fusion protein to produce the VPR-integrase-editing protein fusion protein. In one embodiment, the cell transcribes and translates the fusion protein to produce the VPR-integrase-dCas fusion protein. In one embodiment, the cell transcribes the nucleic acid sequence encoding the sgRNA. In one embodiment, the sgRNA binds to the VPR-integrase-dCas fusion protein.

[0194] In one embodiment, the gag-pol protein, envelope polyprotein, donor sequence RNA, and VPR-integrase-dCas9 protein, which is bound to the sgRNA, are packaged into a viral particle. In one embodiment, the viral particles are collected from the cell media. In one embodiment, VPR is cleaved from the fusion protein in the viral particle via the protease site to provide a IN-dCas fusion protein. In one embodiment, the viral particles transduce a target cell, wherein the sgRNA binds a target region of the cellular DNA thereby targeting the IN-dCas fusion protein, and the integrase catalyzes the integration of the donor sequence into the cellular DNA.

[0195] In one aspect, the delivery system comprises (1) an transfer plasmid, (2) packaging plasmid, and (3) an envelope plasmid. In one embodiment, the packaging plasmid comprises a nucleic acid sequence encoding a gag-pol polyprotein. In one embodiment, the gag-pol polyprotein comprises catalytically dead integrase. In one embodiment, the gag-pol polyprotein comprises the D116N integrase mutation.

[0196] In one embodiment, the transfer plasmid comprises a nucleic acid encoding an sgRNA and a nucleic acid sequence encoding a fusion protein comprising integrase and a editing protein. In one embodiment, the transfer plasmid comprises a 5′ long terminal repeat (LTR) sequence and a 3′ LTR sequence. In one embodiment, the 3′ LTR is a Self-inactivating (SIN) LTR. Thus, in one embodiment, the 5′ LTR comprises a U3 sequence, an R sequence and a U5 sequence and the 3′ LTR comprises an R sequence and a U5 sequence, but does not comprise a U3 sequence. In one embodiment, the 5′ LTR and the 3′ LTR are specific to the integrase of the fusion protein. In one embodiment, the fusion protein comprises integrase and a Cas protein. In one embodiment, the fusion protein comprises integrase and a dCas protein. In one embodiment, the 5′LTR and 3′LTR flank the sequence encoding the fusion protein and the sequence encoding the sgRNA.

[0197] In one embodiment, the envelope plasmid comprises a nucleic acid sequence encoding an envelope protein. In one embodiment, the envelope plasmid comprises a nucleic acid sequence encoding an HIV envelope protein. In one embodiment, the envelope plasmid comprises a nucleic acid sequence encoding a vesicular stomatitis virus g-protein (VSV-g) envelope protein. In one embodiment, the envelope protein can be selected based on the desired cell type.

[0198] In one embodiment, the packaging plasmid, transfer plasmid, and envelope plasmid are introduced into a cell. In one embodiment, the cell transcribes and translates the nucleic acid sequence encoding the gag-pol protein to produce the gag-pol polyprotein. In one embodiment, the cell transcribes and translates the nucleic acid sequence encoding the envelope protein to produce the envelope protein. In one embodiment, the cell transcribes the nucleic acid sequence encoding the sgRNA. In one embodiment, the cell transcribes the nucleic acid sequence encoding the fusion protein.

[0199] In one embodiment, the gag-pol protein, envelope polyprotein, donor sequence RNA, and VPR-integrase-dCas9 protein, which is bound to the sgRNA, are packaged into a viral particle. In one embodiment, the viral particles are collected from the cell media. In one embodiment, the viral particles transduce a target cell, wherein the virus reverse translates, and the cell expresses the fusion protein and sgRNA. In one embodiment, the sgRNA binds to the Cas protein of the fusion protein and to another viral DNA transcript, wherein the integrase catalyzes self integration. In one embodiment, the sgRNA binds to the Cas protein of the fusion protein and to a target region of the cellular DNA, thereby disrupting the target gene.

[0200] In one aspect, the delivery system comprises (1) an transfer plasmid, (2) a first packaging plasmid, (3) a first envelope plasmid, (4) a second packaging plasmid, (5) a second envelope plasmid, and (6) a transfer plasmid. In one embodiment, the first packaging plasmid comprises a nucleic acid sequence encoding a gag-pol polyprotein. In one embodiment, the second packaging plasmid comprises a nucleic acid sequence encoding a gag-pol polyprotein. In one embodiment, the gag-pol polyprotein comprises catalytically dead integrase. In one embodiment, the gag-pol polyprotein comprises the D116N or D64V integrase mutation.

[0201] In one embodiment, the first envelope plasmid comprises a nucleic acid sequence encoding an envelope protein. In one embodiment, the second envelope plasmid comprises a nucleic acid sequence encoding an envelope protein. In one embodiment, the envelope plasmid comprises a nucleic acid sequence encoding an HIV envelope protein. In one embodiment, the envelope plasmid comprises a nucleic acid sequence encoding a vesicular stomatitis virus g-protein (VSV-g) envelope protein. In one embodiment, the envelope protein can be selected based on the desired cell type.

[0202] In one embodiment, the transfer plasmid comprises a nucleic acid encoding an sgRNA and a nucleic acid sequence encoding a fusion protein comprising integrase and a editing protein. In one embodiment, the fusion protein comprises integrase and a Cas protein. In one embodiment, the fusion protein comprises integrase and a dCas protein. In one embodiment, the integrase of the fusion protein is from a different species of lentivirus compared to the gag-pol polyprotein of the first and second packaging plasmid. For example, in one embodiment, the transfer plasmid comprises a nucleic acid encoding a fusion protein comprising FIV integrase and Cas, and the first and second packaging plasmids comprise a nucleic acid sequences encoding a HIV gag-pol polyprotein. In one embodiment, use of different lentiviral species prevents self-integration.

[0203] In one embodiment, the transfer plasmid comprises a 5′ long terminal repeat (LTR) sequence and a 3′ LTR sequence. In one embodiment, the 3′ LTR is a Self-inactivating (SIN) LTR. Thus, in one embodiment, the 5′ LTR comprises a U3 sequence, an R sequence and a U5 sequence and the 3′ LTR comprises an R sequence and a U5 sequence, but does not comprise a U3 sequence. In one embodiment, the 5′ LTR and the 3′ LTR are specific to the integrase of the gag-pol polyprotein. In one embodiment, the 5′LTR and 3′LTR flank the sequence encoding the fusion protein and the sequence encoding the sgRNA.

[0204] In one embodiment, the transfer plasmid comprises a donor sequence. The donor sequence can be any nucleic acid sequence to be delivered to a genome. In one embodiment, the transfer plasmid comprises a 5′ long terminal repeat (LTR) sequence and a 3′ LTR sequence. In one embodiment, the 3′ LTR is a Self-inactivating (SIN) LTR. Thus, in one embodiment, the 5′ LTR comprises a U3 sequence, an R sequence and a U5 sequence and the 3′ LTR comprises an R sequence and a U5 sequence, but does not comprise a U3 sequence. In one embodiment, the 5′ LTR and the 3′ LTR are specific to the integrase in the Inscrtipter transfer plasmid.

[0205] In one embodiment, the first packaging plasmid, transfer plasmid, and first envelope plasmid are introduced into a cell. In one embodiment, the cell transcribes and translates the nucleic acid sequence encoding the gag-pol protein to produce the gag-pol polyprotein. In one embodiment, the cell transcribes and translates the nucleic acid sequence encoding the envelope protein to produce the envelope protein. In one embodiment, the cell transcribes the nucleic acid sequence encoding the sgRNA. In one embodiment, the cell transcribes the nucleic acid sequence encoding the fusion protein. In one embodiment, the gag-pol protein, envelope polyprotein, gRNA and fusion protein RNA, are packaged into a first viral particle. In one embodiment, the first viral particles are collected from the cell media.

[0206] In one embodiment, the second packaging plasmid, transfer plasmid, and second envelope plasmid are introduced into a cell. In one embodiment, the cell transcribes and translates the nucleic acid sequence encoding the gag-pol polyprotein to produce the gag-pol polyprotein. In one embodiment, the cell transcribes and translates the nucleic acid sequence encoding the envelope protein to produce the envelope protein. In one embodiment, the cell transcribes the donor sequence to provide a Donor Sequence RNA molecule. In one embodiment, the gag-pol polyprotein, envelope polyprotein, and donor sequence RNA are packaged into a second viral particle. In one embodiment, the second viral particles are collected from the cell media.

[0207] In one embodiment, the first packaging plasmid, transfer plasmid, first envelope plasmid, the second packaging plasmid, transfer plasmid, and second envelope plasmid are introduced into the same cell. In one embodiment, the first packaging plasmid, transfer plasmid, first envelope plasmid, are introduced into a different cell as the the second packaging plasmid, transfer plasmid, and second envelope plasmid.

[0208] In one embodiment, the first viral particles and second viral particles transduce a target cell. In one embodiment, the virus reverse translates, and the cell expresses the fusion protein and sgRNA, wherein the sgRNA binds to the dCas of the fusion protein. In one embodiment, the virus reverse translates the donor sequence RNA into a donor DNA sequence, which binds to the integrase of the fusion protein. In one embodiment, the sgRNA binds a target region of the cellular DNA thereby targeting the IN-dCas fusion protein, and the integrase catalyzes the integration of the donor DNA sequence into the cellular DNA.

[0209] Further, a number of additional viral based systems have been developed for gene transfer into mammalian cells. For example, retroviruses provide a convenient platform for gene delivery systems. A selected gene can be inserted into a vector and packaged in retroviral particles using techniques known in the art. The recombinant virus can then be isolated and delivered to cells of the subject either in vivo or ex vivo. A number of retroviral systems are known in the art. In some embodiments, adenovirus vectors are used. A number of adenovirus vectors are known in the art. In one embodiment, lentivirus vectors are used.

[0210] For example, vectors derived from retroviruses such as the lentivirus are suitable tools to achieve long-term gene transfer since they allow long-term, stable integration of a transgene and its propagation in daughter cells. Lentiviral vectors have the added advantage over vectors derived from onco-retroviruses such as murine leukemia viruses in that they can transduce non-proliferating cells, such as hepatocytes. They also have the added advantage of low immunogenicity.

[0211] In one embodiment, the composition includes a vector derived from an adeno-associated virus (AAV). The term “AAV vector” means a vector derived from an adeno-associated virus serotype, including without limitation, AAV-1, AAV-2, AAV-3, AAV-4, AAV-5, AAV-6, AAV-7, AAV-8, and AAV-9. AAV vectors have become powerful gene delivery tools for the treatment of various disorders. AAV vectors possess a number of features that render them ideally suited for gene therapy, including a lack of pathogenicity, minimal immunogenicity, and the ability to transduce postmitotic cells in a stable and efficient manner. Expression of a particular gene contained within an AAV vector can be specifically targeted to one or more types of cells by choosing the appropriate combination of AAV serotype, promoter, and delivery method.

[0212] AAV vectors can have one or more of the AAV wild-type genes deleted in whole or part, preferably the rep and/or cap genes, but retain functional flanking ITR sequences. Despite the high degree of homology, the different serotypes have tropisms for different tissues. The receptor for AAV1 is unknown; however, AAV1 is known to transduce skeletal and cardiac muscle more efficiently than AAV2. Since most of the studies have been done with pseudotyped vectors in which the vector DNA flanked with AAV2 ITR is packaged into capsids of alternate serotypes, it is clear that the biological differences are related to the capsid rather than to the genomes. Recent evidence indicates that DNA expression cassettes packaged in AAV 1 capsids are at least 1 log 10 more efficient at transducing cardiomyocytes than those packaged in AAV2 capsids. In one embodiment, the viral delivery system is an adeno-associated viral delivery system. The adeno-associated virus can be of serotype 1 (AAV 1), serotype 2 (AAV2), serotype 3 (AAV3), serotype 4 (AAV4), serotype 5 (AAV5), serotype 6 (AAV6), serotype 7 (AAV7), serotype 8 (AAV8), or serotype 9 (AAV9).

[0213] Desirable AAV fragments for assembly into vectors include the cap proteins, including the vp1, vp2, vp3 and hypervariable regions, the rep proteins, including rep 78, rep 68, rep 52, and rep 40, and the sequences encoding these proteins. These fragments may be readily utilized in a variety of vector systems and host cells. Such fragments may be used alone, in combination with other AAV serotype sequences or fragments, or in combination with elements from other AAV or non-AAV viral sequences. As used herein, artificial AAV serotypes include, without limitation, AAV with a non-naturally occurring capsid protein. Such an artificial capsid may be generated by any suitable technique, using a selected AAV sequence (e.g., a fragment of a vp1 capsid protein) in combination with heterologous sequences which may be obtained from a different selected AAV serotype, non-contiguous portions of the same AAV serotype, from a non-AAV viral source, or from a non-viral source. An artificial AAV serotype may be, without limitation, a chimeric AAV capsid, a recombinant AAV capsid, or a “humanized” AAV capsid. Thus exemplary AAVs, or artificial AAVs, suitable for expression of one or more proteins, include AAV2/8 (see U.S. Pat. No. 7,282,199), AAV2/5 (available from the National Institutes of Health), AAV2/9 (International Patent Publication No. WO2005/033321), AAV2/6 (U.S. Pat. No. 6,156,303), and AAVrh8 (International Patent Publication No. WO2003/042397), among others.

[0214] In certain embodiments, the vector also includes conventional control elements which are operably linked to the transgene in a manner which permits its transcription, translation and/or expression in a cell transfected with the plasmid vector or infected with the virus produced by the invention. As used herein, “operably linked” sequences include both expression control sequences that are contiguous with the gene of interest and expression control sequences that act in trans or at a distance to control the gene of interest. Expression control sequences include appropriate transcription initiation, termination, promoter and enhancer sequences; efficient RNA processing signals such as splicing and polyadenylation (polyA) signals; sequences that stabilize cytoplasmic mRNA; sequences that enhance translation efficiency (i.e., Kozak consensus sequence); sequences that enhance protein stability; and when desired, sequences that enhance secretion of the encoded product. A great number of expression control sequences, including promoters which are native, constitutive, inducible and/or tissue-specific, are known in the art and may be utilized.

[0215] Additional promoter elements, e.g., enhancers, regulate the frequency of transcriptional initiation. Typically, these are located in the region 30-110 bp upstream of the start site, although a number of promoters have recently been shown to contain functional elements downstream of the start site as well. The spacing between promoter elements frequently is flexible, so that promoter function is preserved when elements are inverted or moved relative to one another. In the thymidine kinase (tk) promoter, the spacing between promoter elements can be increased to 50 bp apart before activity begins to decline. Depending on the promoter, it appears that individual elements can function either cooperatively or independently to activate transcription.

[0216] One example of a suitable promoter is the immediate early cytomegalovirus (CMV) promoter sequence. This promoter sequence is a strong constitutive promoter sequence capable of driving high levels of expression of any polynucleotide sequence operatively linked thereto. Another example of a suitable promoter is Elongation Growth Factor-1α (EF-1α). However, other constitutive promoter sequences may also be used, including, but not limited to the simian virus 40 (SV40) early promoter, mouse mammary tumor virus (MMTV), human immunodeficiency virus (HIV) long terminal repeat (LTR) promoter, MoMuLV promoter, an avian leukemia virus promoter, an Epstein-Barr virus immediate early promoter, a Rous sarcoma virus promoter, as well as human gene promoters such as, but not limited to, the actin promoter, the myosin promoter, the hemoglobin promoter, and the creatine kinase promoter. Further, the invention should not be limited to the use of constitutive promoters. Inducible promoters are also contemplated as part of the invention. The use of an inducible promoter provides a molecular switch capable of turning on expression of the polynucleotide sequence which it is operatively linked when such expression is desired, or turning off the expression when expression is not desired. Examples of inducible promoters include, but are not limited to a metallothionine promoter, a glucocorticoid promoter, a progesterone promoter, and a tetracycline promoter.

[0217] Enhancer sequences found on a vector also regulates expression of the gene contained therein. Typically, enhancers are bound with protein factors to enhance the transcription of a gene. Enhancers may be located upstream or downstream of the gene it regulates. Enhancers may also be tissue-specific to enhance transcription in a specific cell or tissue type. In one embodiment, the vector of the present invention comprises one or more enhancers to boost transcription of the gene present within the vector.

[0218] In order to assess the expression of a fusion protein of the invention, the expression vector to be introduced into a cell can also contain either a selectable marker gene or a reporter gene or both to facilitate identification and selection of expressing cells from the population of cells sought to be transfected or infected through viral vectors. In other aspects, the selectable marker may be carried on a separate piece of DNA and used in a co-transfection procedure. Both selectable markers and reporter genes may be flanked with appropriate regulatory sequences to enable expression in the host cells. Useful selectable markers include, for example, antibiotic-resistance genes, such as neo and the like.

[0219] Reporter genes are used for identifying potentially transfected cells and for evaluating the functionality of regulatory sequences. In general, a reporter gene is a gene that is not present in or expressed by the recipient organism or tissue and that encodes a polypeptide whose expression is manifested by some easily detectable property, e.g., enzymatic activity. Expression of the reporter gene is assayed at a suitable time after the DNA has been introduced into the recipient cells. Suitable reporter genes may include genes encoding luciferase, beta-galactosidase, chloramphenicol acetyl transferase, secreted alkaline phosphatase, or the green fluorescent protein gene (e.g., Ui-Tei et al., 2000 FEBS Letters 479: 79-82). Suitable expression systems are well known and may be prepared using known techniques or obtained commercially. In general, the construct with the minimal 5′ flanking region showing the highest level of expression of reporter gene is identified as the promoter. Such promoter regions may be linked to a reporter gene and used to evaluate agents for the ability to modulate promoter-driven transcription.

[0220] Methods of introducing and expressing genes into a cell are known in the art. In the context of an expression vector, the vector can be readily introduced into a host cell, e.g., mammalian, bacterial, yeast, or insect cell by any method in the art. For example, the expression vector can be transferred into a host cell by physical, chemical, or biological means.

[0221] Physical methods for introducing a polynucleotide into a host cell include calcium phosphate precipitation, lipofection, particle bombardment, microinjection, electroporation, and the like. Methods for producing cells comprising vectors and/or exogenous nucleic acids are well-known in the art. See, for example, Sambrook et al. (2012, Molecular Cloning: A Laboratory Manual, Cold Spring Harbor Laboratory, New York). An exemplary method for the introduction of a polynucleotide into a host cell is calcium phosphate transfection.

[0222] Biological methods for introducing a polynucleotide of interest into a host cell include the use of DNA and RNA vectors. Viral vectors, and especially retroviral vectors, have become the most widely used method for inserting genes into mammalian, e.g., human cells. Other viral vectors can be derived from lentivirus, poxviruses, herpes simplex virus I, adenoviruses and adeno-associated viruses, and the like. See, for example, U.S. Pat. Nos. 5,350,674 and 5,585,362.

[0223] Chemical means for introducing a polynucleotide into a host cell include colloidal dispersion systems, such as macromolecule complexes, nanocapsules, microspheres, beads, and lipid-based systems including oil-in-water emulsions, micelles, mixed micelles, and liposomes. An exemplary colloidal system for use as a delivery vehicle in vitro and in vivo is a liposome (e.g., an artificial membrane vesicle).

[0224] In the case where a non-viral delivery system is utilized, an exemplary delivery vehicle is a liposome. The use of lipid formulations is contemplated for the introduction of the nucleic acids into a host cell (in vitro, ex vivo or in vivo). In another aspect, the nucleic acid may be associated with a lipid. The nucleic acid associated with a lipid may be encapsulated in the aqueous interior of a liposome, interspersed within the lipid bilayer of a liposome, attached to a liposome via a linking molecule that is associated with both the liposome and the oligonucleotide, entrapped in a liposome, complexed with a liposome, dispersed in a solution containing a lipid, mixed with a lipid, combined with a lipid, contained as a suspension in a lipid, contained or complexed with a micelle, or otherwise associated with a lipid. Lipid, lipid/DNA or lipid/expression vector associated compositions are not limited to any particular structure in solution. For example, they may be present in a bilayer structure, as micelles, or with a “collapsed” structure. They may also simply be interspersed in a solution, possibly forming aggregates that are not uniform in size or shape. Lipids are fatty substances which may be naturally occurring or synthetic lipids. For example, lipids include the fatty droplets that naturally occur in the cytoplasm as well as the class of compounds which contain long-chain aliphatic hydrocarbons and their derivatives, such as fatty acids, alcohols, amines, amino alcohols, and aldehydes.

[0225] Lipids suitable for use can be obtained from commercial sources. For example, dimyristyl phosphatidylcholine (“DMPC”) can be obtained from Sigma, St. Louis, Mo.; dicetyl phosphate (“DCP”) can be obtained from K & K Laboratories (Plainview, N.Y.); cholesterol (“Choi”) can be obtained from Calbiochem-Behring; dimyristyl phosphatidylglycerol (“DMPG”) and other lipids may be obtained from Avanti Polar Lipids, Inc. (Birmingham, Ala.). Stock solutions of lipids in chloroform or chloroform/methanol can be stored at about −20° C. Chloroform is used as the only solvent since it is more readily evaporated than methanol. “Liposome” is a generic term encompassing a variety of single and multilamellar lipid vehicles formed by the generation of enclosed lipid bilayers or aggregates. Liposomes can be characterized as having vesicular structures with a phospholipid bilayer membrane and an inner aqueous medium. Multilamellar liposomes have multiple lipid layers separated by aqueous medium. They form spontaneously when phospholipids are suspended in an excess of aqueous solution. The lipid components undergo self-rearrangement before the formation of closed structures and entrap water and dissolved solutes between the lipid bilayers (Ghosh et al., 1991 Glycobiology 5: 505-10). However, compositions that have different structures in solution than the normal vesicular structure are also encompassed. For example, the lipids may assume a micellar structure or merely exist as nonuniform aggregates of lipid molecules. Also contemplated are lipofectamine-nucleic acid complexes.

[0226] Regardless of the method used to introduce exogenous nucleic acids into a host cell, in order to confirm the presence of the recombinant DNA sequence in the host cell, a variety of assays may be performed. Such assays include, for example, “molecular biological” assays well known to those of skill in the art, such as Southern and Northern blotting, RT-PCR and PCR; “biochemical” assays, such as detecting the presence or absence of a particular peptide, e.g., by immunological means (ELISAs and Western blots) or by assays described herein to identify agents falling within the scope of the invention.

### Systems

[0227] In one aspect, the present invention provides a system for editing genetic material, such as nucleic acid molecule, a genome or, a gene. In one embodiment the system comprises, in one or more vectors, a nucleic acid sequence encoding a fusion protein, wherein the fusion protein comprises a retroviral integrase (IN), or a fragment thereof, a CRISPR-associated (Cas) protein, and a nuclear localization signal (NLS); a nucleic acid sequence coding a CRISPR-Cas system guide RNA; and a nucleic acid sequence coding a donor template nucleic acid, wherein the donor template nucleic acid comprises a U3 sequence, a U5 sequence and a donor template sequence. In one embodiment, the CRISPR-Cas system guide RNA substantially hybridizes to a target DNA sequence in the gene.

[0228] In one embodiment, the system comprises, in one or more vectors, a nucleic acid sequence encoding a fusion protein, wherein the fusion protein comprises a retroviral integrase (IN), or a fragment thereof, a CRISPR-associated (Cas) protein, and a nuclear localization signal (NLS); a nucleic acid sequence coding a first CRISPR-Cas system guide RNA; a nucleic acid sequence coding a second CRISPR-Cas system guide RNA; and a nucleic acid sequence coding a donor template nucleic acid, wherein the donor template nucleic acid comprises a U3 sequence, a U5 sequence and a donor template sequence. In one embodiment, the first CRISPR-Cas system guide RNA substantially hybridizes to a first DNA sequence and the second CRISPR-Cas system guide RNA substantially hybridizes to a second DNA sequence. In one embodiment, the first DNA sequence and second DNA sequence flank a target insertion region. In one embodiment, the system catalyzes the insertion of the donor template nucleic acid into the target insertion region.

[0229] In one embodiment, the system comprises, in one or more vectors, a nucleic acid sequence encoding a first fusion protein, wherein the first fusion protein comprises a retroviral integrase (IN), or a fragment thereof, a CRISPR-associated (Cas) protein, and a nuclear localization signal (NLS); a nucleic acid sequence coding a first CRISPR-Cas system guide RNA; a nucleic acid sequence encoding a second fusion protein, wherein the second fusion protein comprises a retroviral integrase (IN), or a fragment thereof, a CRISPR-associated (Cas) protein, and a nuclear localization signal (NLS); a nucleic acid sequence coding a first CRISPR-Cas system guide RNA; a nucleic acid sequence coding a second CRISPR-Cas system guide RNA; and a nucleic acid sequence coding a donor template nucleic acid, wherein the donor template nucleic acid comprises a U3 sequence, a U5 sequence and a donor template sequence.

[0230] In one embodiment, the first fusion protein and the second fusion protein are the same or are different. For example, in one embodiment, the first fusion protein comprises a HIV IN, or a fragment thereof, a dCas9 protein, and a NLS; and the second fusion protein comprises a BIV IN, or a fragment thereof, a Cpf1 Cas protein, and a NLS.

[0231] In one embodiment the U3 is specific to the retroviral IN of the first fusion protein and the U5 is specific to the retroviral IN of the second fusion protein. For example, in one embodiment, the first fusion protein comprises a HIV IN, or a fragment thereof, a dCas9 protein, and a NLS; the second fusion protein comprises a BIV IN, or a fragment thereof, a Cpf1 Cas protein, and a NLS; the U3 sequence is specific to HIV IN and the U5 sequence is specific to BIV IN.

[0232] In one embodiment, the first CRISPR-Cas system guide RNA substantially hybridizes to a first DNA sequence and the second CRISPR-Cas system guide RNA substantially hybridizes to a second DNA sequence. In one embodiment, the first DNA sequence and second DNA sequence flank a target insertion region. In one embodiment, the system catalyzes the insertion of the donor template nucleic acid into the target insertion region.

[0233] In one embodiment the system comprises a nucleic acid sequence encoding a fusion protein, wherein the fusion protein comprises a retroviral integrase (IN), or a fragment thereof; a CRISPR-associated (Cas) protein, and a nuclear localization signal (NLS); a CRISPR-Cas system guide RNA; a donor template nucleic acid, wherein the donor template nucleic acid comprises a U3 sequence, a U5 sequence and a donor template sequence.

[0234] In one embodiment, the nucleic acid sequence encoding a fusion protein, nucleic acid sequence coding a CRISPR-Cas system guide RNA, and the nucleic acid sequence coding a donor template nucleic acid are on the same or different vectors.

[0235] In one embodiment, the nucleic acid sequence encoding a fusion protein encodes a fusion protein comprising a sequence at least 70%, at least 71%, at least 72%, at least 73%, at least 74%, at least 75%, at least 76%, at least 77%, at least 78%, at least 79%, 80%, at least 81%, at least 82%, at least 83%, at least 84%, at least 85%, at least 86%, at least 87%, at least 88%, at least 89%, 90%, at least 91%, at least 92%, at least 93%, at least 94%, at least 95%, at least 96%, at least 97%, at least 98%, or at least 99% identical to one of SEQ ID NOs:57-98. In one embodiment, the nucleic acid sequence encoding a fusion protein encodes a fusion protein comprising a sequence of one of SEQ ID NOs:57-98.

[0236] In one embodiment, the nucleic acid sequence encoding a fusion protein comprises a nucleic acid sequence at least 70%, at least 71%, at least 72%, at least 73%, at least 74%, at least 75%, at least 76%, at least 77%, at least 78%, at least 79%, 80%, at least 81%, at least 82%, at least 83%, at least 84%, at least 85%, at least 86%, at least 87%, at least 88%, at least 89%, 90%, at least 91%, at least 92%, at least 93%, at least 94%, at least 95%, at least 96%, at least 97%, at least 98%, or at least 99% identical to one of SEQ ID NOs:155-196. In one embodiment, the nucleic acid sequence encoding a fusion protein comprises a nucleic acid sequence of one of SEQ ID NOs:155-196.

[0237] In one embodiment, the U3 sequence and U5 sequence are specific to the retroviral IN. For example, in one embodiment, the retroviral IN is HIV IN and the U3 sequence comprises a sequence at least 70%, at least 71%, at least 72%, at least 73%, at least 74%, at least 75%, at least 76%, at least 77%, at least 78%, at least 79%, 80%, at least 81%, at least 82%, at least 83%, at least 84%, at least 85%, at least 86%, at least 87%, at least 88%, at least 89%, 90%, at least 91%, at least 92%, at least 93%, at least 94%, at least 95%, at least 96%, at least 97%, at least 98%, or at least 99% identical to SEQ ID NO:197 and the U5 sequence comprises a sequence at least 70%, at least 71%, at least 72%, at least 73%, at least 74%, at least 75%, at least 76%, at least 77%, at least 78%, at least 79%, 80%, at least 81%, at least 82%, at least 83%, at least 84%, at least 85%, at least 86%, at least 87%, at least 88%, at least 89%, 90%, at least 91%, at least 92%, at least 93%, at least 94%, at least 95%, at least 96%, at least 97%, at least 98%, or at least 99% identical to SEQ ID NO:198.

[0238] In one embodiment, the retroviral IN is RSV IN and the U3 sequence comprises a sequence at least 70%, at least 71%, at least 72%, at least 73%, at least 74%, at least 75%, at least 76%, at least 77%, at least 78%, at least 79%, 80%, at least 81%, at least 82%, at least 83%, at least 84%, at least 85%, at least 86%, at least 87%, at least 88%, at least 89%, 90%, at least 91%, at least 92%, at least 93%, at least 94%, at least 95%, at least 96%, at least 97%, at least 98%, or at least 99% identical to SEQ ID NO:199 and the U5 sequence comprises a sequence 95% identical to SEQ ID NO:200.

[0239] In one embodiment, the retroviral IN is HFV IN and the U3 sequence comprises a sequence at least 70%, at least 71%, at least 72%, at least 73%, at least 74%, at least 75%, at least 76%, at least 77%, at least 78%, at least 79%, 80%, at least 81%, at least 82%, at least 83%, at least 84%, at least 85%, at least 86%, at least 87%, at least 88%, at least 89%, 90%, at least 91%, at least 92%, at least 93%, at least 94%, at least 95%, at least 96%, at least 97%, at least 98%, or at least 99% identical to SEQ ID NO:201 and the U5 sequence comprises a sequence at least 70%, at least 71%, at least 72%, at least 73%, at least 74%, at least 75%, at least 76%, at least 77%, at least 78%, at least 79%, 80%, at least 81%, at least 82%, at least 83%, at least 84%, at least 85%, at least 86%, at least 87%, at least 88%, at least 89%, 90%, at least 91%, at least 92%, at least 93%, at least 94%, at least 95%, at least 96%, at least 97%, at least 98%, or at least 99% identical to SEQ ID NO:202.

[0240] In one embodiment, the retroviral IN is EIAV IN and the U3 sequence comprises a sequence at least 70%, at least 71%, at least 72%, at least 73%, at least 74%, at least 75%, at least 76%, at least 77%, at least 78%, at least 79%, 80%, at least 81%, at least 82%, at least 83%, at least 84%, at least 85%, at least 86%, at least 87%, at least 88%, at least 89%, 90%, at least 91%, at least 92%, at least 93%, at least 94%, at least 95%, at least 96%, at least 97%, at least 98%, or at least 99% identical to SEQ ID NO:203 and the U5 sequence comprises a sequence at least 70%, at least 71%, at least 72%, at least 73%, at least 74%, at least 75%, at least 76%, at least 77%, at least 78%, at least 79%, 80%, at least 81%, at least 82%, at least 83%, at least 84%, at least 85%, at least 86%, at least 87%, at least 88%, at least 89%, 90%, at least 91%, at least 92%, at least 93%, at least 94%, at least 95%, at least 96%, at least 97%, at least 98%, or at least 99% identical to SEQ ID NO:204.

[0241] In one embodiment, the retroviral IN is MoLV IN and the U3 sequence comprises a sequence at least 70%, at least 71%, at least 72%, at least 73%, at least 74%, at least 75%, at least 76%, at least 77%, at least 78%, at least 79%, 80%, at least 81%, at least 82%, at least 83%, at least 84%, at least 85%, at least 86%, at least 87%, at least 88%, at least 89%, 90%, at least 91%, at least 92%, at least 93%, at least 94%, at least 95%, at least 96%, at least 97%, at least 98%, or at least 99% identical to SEQ ID NO:205 and the U5 sequence comprises a sequence at least 70%, at least 71%, at least 72%, at least 73%, at least 74%, at least 75%, at least 76%, at least 77%, at least 78%, at least 79%, 80%, at least 81%, at least 82%, at least 83%, at least 84%, at least 85%, at least 86%, at least 87%, at least 88%, at least 89%, 90%, at least 91%, at least 92%, at least 93%, at least 94%, at least 95%, at least 96%, at least 97%, at least 98%, or at least 99% identical to SEQ ID NO:206.

[0242] In one embodiment, the retroviral IN is MMTV IN and the U3 sequence comprises a sequence at least 70%, at least 71%, at least 72%, at least 73%, at least 74%, at least 75%, at least 76%, at least 77%, at least 78%, at least 79%, 80%, at least 81%, at least 82%, at least 83%, at least 84%, at least 85%, at least 86%, at least 87%, at least 88%, at least 89%, 90%, at least 91%, at least 92%, at least 93%, at least 94%, at least 95%, at least 96%, at least 97%, at least 98%, or at least 99% identical to SEQ ID NO:207 and the U5 sequence comprises a sequence at least 70%, at least 71%, at least 72%, at least 73%, at least 74%, at least 75%, at least 76%, at least 77%, at least 78%, at least 79%, 80%, at least 81%, at least 82%, at least 83%, at least 84%, at least 85%, at least 86%, at least 87%, at least 88%, at least 89%, 90%, at least 91%, at least 92%, at least 93%, at least 94%, at least 95%, at least 96%, at least 97%, at least 98%, or at least 99% identical to SEQ ID NO:208.

[0243] In one embodiment, the retroviral IN is WDSV IN and the U3 sequence comprises a sequence at least 70%, at least 71%, at least 72%, at least 73%, at least 74%, at least 75%, at least 76%, at least 77%, at least 78%, at least 79%, 80%, at least 81%, at least 82%, at least 83%, at least 84%, at least 85%, at least 86%, at least 87%, at least 88%, at least 89%, 90%, at least 91%, at least 92%, at least 93%, at least 94%, at least 95%, at least 96%, at least 97%, at least 98%, or at least 99% identical to SEQ ID NO:209 and the U5 sequence comprises a sequence at least 70%, at least 71%, at least 72%, at least 73%, at least 74%, at least 75%, at least 76%, at least 77%, at least 78%, at least 79%, 80%, at least 81%, at least 82%, at least 83%, at least 84%, at least 85%, at least 86%, at least 87%, at least 88%, at least 89%, 90%, at least 91%, at least 92%, at least 93%, at least 94%, at least 95%, at least 96%, at least 97%, at least 98%, or at least 99% identical to SEQ ID NO:210.

[0244] In one embodiment, the retroviral IN is BLV IN and the U3 sequence comprises a sequence at least 70%, at least 71%, at least 72%, at least 73%, at least 74%, at least 75%, at least 76%, at least 77%, at least 78%, at least 79%, 80%, at least 81%, at least 82%, at least 83%, at least 84%, at least 85%, at least 86%, at least 87%, at least 88%, at least 89%, 90%, at least 91%, at least 92%, at least 93%, at least 94%, at least 95%, at least 96%, at least 97%, at least 98%, or at least 99% identical to SEQ ID NO:211 and the U5 sequence comprises a sequence at least 70%, at least 71%, at least 72%, at least 73%, at least 74%, at least 75%, at least 76%, at least 77%, at least 78%, at least 79%, 80%, at least 81%, at least 82%, at least 83%, at least 84%, at least 85%, at least 86%, at least 87%, at least 88%, at least 89%, 90%, at least 91%, at least 92%, at least 93%, at least 94%, at least 95%, at least 96%, at least 97%, at least 98%, or at least 99% identical to SEQ ID NO:212.

[0245] In one embodiment, the retroviral IN is SIV IN and the U3 sequence comprises a sequence at least 70%, at least 71%, at least 72%, at least 73%, at least 74%, at least 75%, at least 76%, at least 77%, at least 78%, at least 79%, 80%, at least 81%, at least 82%, at least 83%, at least 84%, at least 85%, at least 86%, at least 87%, at least 88%, at least 89%, 90%, at least 91%, at least 92%, at least 93%, at least 94%, at least 95%, at least 96%, at least 97%, at least 98%, or at least 99% identical to SEQ ID NO:213 and the U5 sequence comprises a sequence at least 70%, at least 71%, at least 72%, at least 73%, at least 74%, at least 75%, at least 76%, at least 77%, at least 78%, at least 79%, 80%, at least 81%, at least 82%, at least 83%, at least 84%, at least 85%, at least 86%, at least 87%, at least 88%, at least 89%, 90%, at least 91%, at least 92%, at least 93%, at least 94%, at least 95%, at least 96%, at least 97%, at least 98%, or at least 99% identical to SEQ ID NO:214.

[0246] In one embodiment, the retroviral IN is FIV IN and the U3 sequence comprises a sequence at least 70%, at least 71%, at least 72%, at least 73%, at least 74%, at least 75%, at least 76%, at least 77%, at least 78%, at least 79%, 80%, at least 81%, at least 82%, at least 83%, at least 84%, at least 85%, at least 86%, at least 87%, at least 88%, at least 89%, 90%, at least 91%, at least 92%, at least 93%, at least 94%, at least 95%, at least 96%, at least 97%, at least 98%, or at least 99% identical to SEQ ID NO:215 and the U5 sequence comprises a 70%, at least 71%, at least 72%, at least 73%, at least 74%, at least 75%, at least 76%, at least 77%, at least 78%, at least 79%, 80%, at least 81%, at least 82%, at least 83%, at least 84%, at least 85%, at least 86%, at least 87%, at least 88%, at least 89%, 90%, at least 91%, at least 92%, at least 93%, at least 94%, at least 95%, at least 96%, at least 97%, at least 98%, or at least 99% identical to SEQ ID NO:216.

[0247] In one embodiment, the retroviral IN is BIV IN and the U3 sequence comprises a sequence at least 70%, at least 71%, at least 72%, at least 73%, at least 74%, at least 75%, at least 76%, at least 77%, at least 78%, at least 79%, 80%, at least 81%, at least 82%, at least 83%, at least 84%, at least 85%, at least 86%, at least 87%, at least 88%, at least 89%, 90%, at least 91%, at least 92%, at least 93%, at least 94%, at least 95%, at least 96%, at least 97%, at least 98%, or at least 99% identical to SEQ ID NO:217 and the U5 sequence comprises a sequence at least 70%, at least 71%, at least 72%, at least 73%, at least 74%, at least 75%, at least 76%, at least 77%, at least 78%, at least 79%, 80%, at least 81%, at least 82%, at least 83%, at least 84%, at least 85%, at least 86%, at least 87%, at least 88%, at least 89%, 90%, at least 91%, at least 92%, at least 93%, at least 94%, at least 95%, at least 96%, at least 97%, at least 98%, or at least 99% identical to SEQ ID NO:218.

[0248] In one embodiment, the IN is TY1 and the U3 sequence comprises a sequence at least 70%, at least 71%, at least 72%, at least 73%, at least 74%, at least 75%, at least 76%, at least 77%, at least 78%, at least 79%, 80%, at least 81%, at least 82%, at least 83%, at least 84%, at least 85%, at least 86%, at least 87%, at least 88%, at least 89%, 90%, at least 91%, at least 92%, at least 93%, at least 94%, at least 95%, at least 96%, at least 97%, at least 98%, or at least 99% identical to SEQ ID NO:219 and the U5 sequence comprises a sequence at least 70%, at least 71%, at least 72%, at least 73%, at least 74%, at least 75%, at least 76%, at least 77%, at least 78%, at least 79%, 80%, at least 81%, at least 82%, at least 83%, at least 84%, at least 85%, at least 86%, at least 87%, at least 88%, at least 89%, 90%, at least 91%, at least 92%, at least 93%, at least 94%, at least 95%, at least 96%, at least 97%, at least 98%, or at least 99% identical to SEQ ID NO:220.

[0249] In one embodiment, the IN is InsF IN and the U3 sequence is a IS3 IRL sequence and the U5 sequence is a IS3 IRR sequence. In one embodiment, the IN is InsF IN and the U3 sequence comprises a sequence at least 70%, at least 71%, at least 72%, at least 73%, at least 74%, at least 75%, at least 76%, at least 77%, at least 78%, at least 79%, 80%, at least 81%, at least 82%, at least 83%, at least 84%, at least 85%, at least 86%, at least 87%, at least 88%, at least 89%, 90%, at least 91%, at least 92%, at least 93%, at least 94%, at least 95%, at least 96%, at least 97%, at least 98%, or at least 99% identical to SEQ ID NO:221 and the U5 sequence comprises a sequence at least 70%, at least 71%, at least 72%, at least 73%, at least 74%, at least 75%, at least 76%, at least 77%, at least 78%, at least 79%, 80%, at least 81%, at least 82%, at least 83%, at least 84%, at least 85%, at least 86%, at least 87%, at least 88%, at least 89%, 90%, at least 91%, at least 92%, at least 93%, at least 94%, at least 95%, at least 96%, at least 97%, at least 98%, or at least 99% identical to SEQ ID NO:222.

[0250] The systems and vectors can be designed for expression of CRISPR transcripts (e.g. nucleic acid transcripts, proteins, or enzymes) in prokaryotic or eukaryotic cells. For example, CRISPR transcripts can be expressed in bacterial cells such as Escherichia coli, insect cells (using baculovirus expression vectors), yeast cells, or mammalian cells. Suitable host cells are discussed further in Goeddel, GENE EXPRESSION TECHNOLOGY: METHODS IN ENZYMOLOGY 185, Academic Press, San Diego, Calif. (1990). Alternatively, the recombinant expression vector systems can be transcribed and translated in vitro, for example using T7 promoter regulatory sequences and T7 polymerase.

[0251] Vectors may be introduced and propagated in a prokaryote. In some embodiments, a prokaryote is used to amplify copies of a vector to be introduced into a eukaryotic cell or as an intermediate vector in the production of a vector to be introduced into a eukaryotic cell (e.g. amplifying a plasmid as part of a viral vector packaging system). In some embodiments, a prokaryote is used to amplify copies of a vector and express one or more nucleic acids, such as to provide a source of one or more proteins for delivery to a host cell or host organism. Expression of proteins in prokaryotes is most often carried out in Escherichia coli with vectors containing constitutive or inducible promoters directing the expression of either fusion or non-fusion proteins. Fusion vectors add a number of amino acids to a protein encoded therein, such as to the amino terminus of the recombinant protein. Such fusion vectors may serve one or more purposes, such as: (i) to increase expression of recombinant protein; (ii) to increase the solubility of the recombinant protein; and (iii) to aid in the purification of the recombinant protein by acting as a ligand in affinity purification. Often, in fusion expression vectors, a proteolytic cleavage site is introduced at the junction of the fusion moiety and the recombinant protein to enable separation of the recombinant protein from the fusion moiety subsequent to purification of the fusion protein. Such enzymes, and their cognate recognition sequences, include Factor Xa, thrombin and enterokinase. Example fusion expression vectors include pGEX (Pharmacia Biotech Inc; Smith and Johnson, 1988. Gene 67: 31-40), pMAL (New England Biolabs, Beverly, Mass.) and pRIT5 (Pharmacia, Piscataway, N.J.) that fuse glutathione S-transferase (GST), maltose E binding protein, or protein A. respectively, to the target recombinant protein.

[0252] Examples of suitable inducible non-fusion E. coli expression vectors include pTrc (Amrann et al., (1988) Gene 69:301-315) and pET 11d (Studier et al., GENE EXPRESSION TECHNOLOGY: METHODS IN ENZYMOLOGY 185, Academic Press, San Diego, Calif. (1990) 60-89).

[0253] In some embodiments, a vector is a yeast expression vector. Examples of vectors for expression in yeast Saccharomyces cerevisiae include pYepSec1 (Baldari, et al., 1987. EMBO J. 6: 229-234), pMFa (Kuijan and Herskowitz, 1982. Cell 30: 933-943), pJRY88 (Schultz et al., 1987. Gene 54: 113-123), pYES2 (Invitrogen Corporation, San Diego, Calif.), and picZ (InVitrogen Corp, San Diego, Calif.).

[0254] In some embodiments, a vector drives protein expression in insect cells using baculovirus expression vectors. Baculovirus vectors available for expression of proteins in cultured insect cells (e.g., SF9 cells) include the pAc series (Smith, et al., 1983. Mol. Cell. Biol. 3: 2156-2165) and the pVL series (Lucklow and Summers, 1989. Virology 170: 31-39).

[0255] In some embodiments, a vector is capable of driving expression of one or more sequences in mammalian cells using a mammalian expression vector. Examples of mammalian expression vectors include pCDM8 (Seed, 1987. Nature 329: 840) and pMT2PC (Kaufman, et al., 1987. EMBO J. 6: 187-195). When used in mammalian cells, the expression vector's control functions are typically provided by one or more regulatory elements. For example, commonly used promoters are derived from polyoma, adenovirus 2, cytomegalovirus, simian virus 40, and others disclosed herein and known in the art. For other suitable expression systems for both prokaryotic and eukaryotic cells see, e.g., Chapters 16 and 17 of Sambrook, et al., MOLECULAR CLONING: A LABORATORY MANUAL. 2nd ed., Cold Spring Harbor Laboratory, Cold Spring Harbor Laboratory Press, Cold Spring Harbor, N.Y., 1989.

[0256] In some embodiments, the recombinant mammalian expression vector is capable of directing expression of the nucleic acid preferentially in a particular cell type (e.g., tissue-specific regulatory elements are used to express the nucleic acid). Tissue-specific regulatory elements are known in the art. Non-limiting examples of suitable tissue-specific promoters include the albumin promoter (liver-specific; Pinkert, et al., 1987. Genes Dev. 1: 268-277), lymphoid-specific promoters (Calame and Eaton, 1988. Adv. Immunol. 43: 235-275), in particular promoters of T cell receptors (Winoto and Baltimore, 1989. EMBO J. 8: 729-733) and immunoglobulins (Baneiji, et al., 1983. Cell 33: 729-740; Queen and Baltimore, 1983. Cell 33: 741-748), neuron-specific promoters (e.g., the neurofilament promoter; Byrne and Ruddle, 1989. Proc. Natl. Acad. Sci. USA 86: 5473-5477), pancreas-specific promoters (Edlund, et al., 1985. Science 230: 912-916), and mammary gland-specific promoters (e.g., milk whey promoter; U.S. Pat. No. 4,873,316 and European Application Publication No. 264,166). Developmentally-regulated promoters are also encompassed, e.g., the murine hox promoters (Kessel and Gruss, 1990. Science 249: 374-379) and the α-fetoprotein promoter (Campes and Tilghman, 1989. Genes Dev. 3: 537-546).

[0257] In some embodiments, a regulatory element is operably linked to one or more elements of a CRISPR system so as to drive expression of the one or more elements of the CRISPR system. In general, CRISPRs (Clustered Regularly Interspaced Short Palindromic Repeats), also known as SPIDRs (SPacer Interspersed Direct Repeats), constitute a family of DNA loci that are usually specific to a particular bacterial species. The CRISPR locus comprises a distinct class of interspersed short sequence repeats (SSRs) that were recognized in E. coli (Ishino et al., J. Bacteriol., 169:5429-5433 [1987]; and Nakata et al., J. Bacteriol., 171:3553-3556 [1989]), and associated genes. Similar interspersed SSRs have been identified in Haloferax mediterranei, Streptococcus pyogenes, Anabaena, and Mycobacterium tuberculosis (See, Groenen et al., Mol. Microbiol., 10:1057-1065 [1993]; Hoe et al., Emerg. Infect. Dis., 5:254-263 [1999]; Masepohl et al., Biochim. Biophys. Acta 1307:26-30 [1996]; and Mojica et al., Mol. Microbiol., 17:85-93 [1995]). The CRISPR loci typically differ from other SSRs by the structure of the repeats, which have been termed short regularly spaced repeats (SRSRs) (Janssen et al., OMICS J. Integ. Biol., 6:23-33 [2002]; and Mojica et al., Mol. Microbiol., 36:244-246 [2000]). In general, the repeats are short elements that occur in clusters that are regularly spaced by unique intervening sequences with a substantially constant length (Mojica et al., [2000], supra). Although the repeat sequences are highly conserved between strains, the number of interspersed repeats and the sequences of the spacer regions typically differ from strain to strain (van Embden et al., J. Bacteriol., 182:2393-2401 [2000]). CRISPR loci have been identified in more than 40 prokaryotes (See e.g., Jansen et al., Mol. Microbiol., 43:1565-1575 [2002]; and Mojica et al., [2005]) including, but not limited to Aeropyrum, Pyrobaculum, Sulfolobus, Archaeoglobus, Halocarcula, Methanobacteriumn, Methanococcus, Methanosarcina, Methanopyrus, Pyrococcus, Picrophilus, Thernioplasnia, Corynebacterium, Mycobacterium, Streptomyces, Aquifrx, Porphvromonas, Chlorobium, Thermus, Bacillus, Listeria, Staphylococcus, Clostridium, Thermoanaerobacter, Mycoplasma, Fusobacterium, Azarcus, Chromobacterium, Neisseria, Nitrosomonas, Desulfovibrio, Geobacter, Myrococcus, Campylobacter, Wolinella, Acinetobacter, Erwinia, Escherichia, Legionella, Methylococcus, Pasteurella, Photobacterium, Salmonella, Xanthomonas, Yersinia, Treponema, and Thermotoga.

[0258] As used herein, a “target sequence” refers to a sequence to which a guide sequence is designed to have complementarity, where hybridization between a target sequence and a guide sequence promotes the formation of a CRISPR complex. Full complementarity is not necessarily required, provided there is sufficient complementarity to cause hybridization and promote formation of a CRISPR complex. A target sequence may comprise any polynucleotide, such as DNA or RNA polynucleotides. In some embodiments, a target sequence is located in the nucleus or cytoplasm of a cell. In some embodiments, the target sequence may be within an organelle of a eukaryotic cell, for example, mitochondrion or chloroplast. A sequence or template that may be used for recombination into the targeted locus comprising the target sequences is referred to as an “editing template” or “editing polynucleotide” or “editing sequence”. In aspects of the invention, an exogenous template polynucleotide may be referred to as an editing template. In an aspect of the invention the recombination is homologous recombination.

[0259] A guide sequence may be selected to target any target sequence. In some embodiments, the target sequence is a sequence within a genome of a cell. Exemplary target sequences include those that are unique in the target genome. For example, for the S. pyogenes Cas9, a unique target sequence in a genome may include a Cas9 target site of the form MMMMMMMMNNNNNNNNNNNNXGG where NNNNNNNNNNNNXGG (N is A, G, T, or C; and X can be anything) has a single occurrence in the genome. A unique target sequence in a genome may include an S. pyogenes Cas9 target site of the form MMMMMMMMMNNNNNNNNNNNXGG where NNNNNNNNNNNXGG (N is A, G, T, or C; and X can be anything) has a single occurrence in the genome. For the S. thermophilus CRISPR1 Cas9, a unique target sequence in a genome may include a Cas9 target site of the form MMMMMMMMNNNNNNNNNNNNXXAGAAW (SEQ ID NO: 1) where NNNNNNNNNNNNXXAGAAW (SEQ ID NO: 2) (N is A, G, T, or C; X can be anything; and W is A or T) has a single occurrence in the genome. A unique target sequence in a genome may include an S. thermophilus CRISPR1 Cas9 target site of the form MMMMMMMMMNNNNNNNNNNNXXAGAAW (SEQ ID NO: 3) where NNNNNNNNNNNXXAGAAW (SEQ ID NO: 4) (N is A, G, T, or C; X can be anything; and W is A or T) has a single occurrence in the genome. For the S. pyogenes Cas9, a unique target sequence in a genome may include a Cas9 target site of the form MMMMMMMMNNNNNNNNNNNNXGGXG where NNNNNNNNNNNNXGGXG (N is A, G, T, or C; and X can be anything) has a single occurrence in the genome. A unique target sequence in a genome may include an S. pyogenes Cas9 target site of the form MMMMMMMMMNNNNNNNNNNNXGGXG where NNNNNNNNNNNXGGXG (N is A, G, T, or C; and X can be anything) has a single occurrence in the genome. In each of these sequences “M” may be A, G, T, or C, and need not be considered in identifying a sequence as unique.

[0260] In some embodiments, a guide sequence is selected to reduce the degree of secondary structure within the guide sequence. Secondary structure may be determined by any suitable polynucleotide folding algorithm. Some programs are based on calculating the minimal Gibbs free energy. An example of one such algorithm is mFold, as described by Zuker and Stiegler (Nucleic Acids Res. 9 (1981), 133-148). Another example folding algorithm is the online webserver RNAfold, developed at Institute for Theoretical Chemistry at the University of Vienna, using the centroid structure prediction algorithm (see e.g. A. R. Gruber et al., 2008, Cell 106(1): 23-24; and P A Carr and G M Church, 2009, Nature Biotechnology 27(12): 1151-62).

[0261] In general, a tracr mate sequence includes any sequence that has sufficient complementarity with a tracr sequence to promote one or more of: (1) excision of a guide sequence flanked by tracr mate sequences in a cell containing the corresponding tracr sequence; and (2) formation of a CRISPR complex at a target sequence, wherein the CRISPR complex comprises the tracr mate sequence hybridized to the tracr sequence. In general, degree of complementarity is with reference to the optimal alignment of the tracr mate sequence and tracr sequence, along the length of the shorter of the two sequences. Optimal alignment may be determined by any suitable alignment algorithm, and may further account for secondary structures, such as self-complementarity within either the tracr sequence or tracr mate sequence. In some embodiments, the degree of complementarity between the tracr sequence and tracr mate sequence along the length of the shorter of the two when optimally aligned is about or more than about 25%, 30%, 40%, 50%, 60%, 70%, 80%, 90%, 95%, 97.5%, 99%, or higher. In some embodiments, the tracr sequence is about or more than about 5, 6, 7, 8, 9, 10, 11, 12, 13, 14, 15, 16, 17, 18, 19, 20, 25, 30, 40, 50, or more nucleotides in length. In some embodiments, the tracr sequence and tracr mate sequence are contained within a single transcript, such that hybridization between the two produces a transcript having a secondary structure, such as a hairpin. In one embodiment, loop forming sequences for use in hairpin structures are four nucleotides in length. In one embodiment, loop forming sequences for use in hairpin structures have the sequence GAAA. However, longer or shorter loop sequences may be used, as may alternative sequences. The sequences may include a nucleotide triplet (for example, AAA), and an additional nucleotide (for example C or G). Examples of loop forming sequences include CAAA and AAAG. In an embodiment of the invention, the transcript or transcribed polynucleotide sequence has at least two or more hairpins. In some embodiments, the transcript has two, three, four or five hairpins. In a further embodiment of the invention, the transcript has at most five hairpins. In some embodiments, the single transcript further includes a transcription termination sequence; in some embodiments this is a polyT sequence, for example six T nucleotides.

### Methods of Editing and Delivery Nucleic Acids

[0262] In one embodiment, the present invention provides methods of editing genetic material, such as nucleic acid molecule, a genome or, a gene. For example, in one embodiment, editing is integration. In one embodiment, editing is CIRSPR-mediated editing.

[0263] In one embodiment, the method comprises administering to the genetic material: a nucleic acid molecule encoding a fusion protein; a guide nucleic acid comprising a targeting nucleotide sequence complimentary to a target region in the genetic material; and a donor template nucleic acid comprising a U3 sequence, a U5 sequence and a donor template sequence. In one embodiment, the method comprises administering to the genetic material: a fusion protein; a guide nucleic acid comprising a targeting nucleotide sequence complimentary to a target region in the genetic material; and a donor template nucleic acid comprising a U3 sequence, a U5 sequence and a donor template sequence. In one embodiment, the method is and in vitro method or an in vivo method.

[0264] In one embodiment, the present invention provides methods of delivering a nucleic acid sequence to genetic material. In one embodiment, the method comprises administering to the gene: a nucleic acid molecule encoding a fusion protein; a guide nucleic acid comprising a targeting nucleotide sequence complimentary to a target region in the gene; and a donor template nucleic acid comprising a U3 sequence, a U5 sequence and a donor template sequence. In one embodiment, the method comprises administering to the genetic material: a fusion protein; a guide nucleic acid comprising a targeting nucleotide sequence complimentary to a target region in the genetic material; and a donor template nucleic acid comprising a U3 sequence, a U5 sequence and a donor template sequence. In one embodiment, the method is and in vitro method or an in vivo method.

[0265] In one embodiment, the method comprises administering to a cell a nucleic acid molecule encoding a fusion protein; a guide nucleic acid comprising a targeting nucleotide sequence complimentary to a target region in the gene; and a donor template nucleic acid comprising a U3 sequence, a U5 sequence and a donor template sequence. In one embodiment, the method comprises administering to a cell a fusion protein; a guide nucleic acid comprising a targeting nucleotide sequence complimentary to a target region in the gene; and a donor template nucleic acid comprising a U3 sequence, a U5 sequence and a donor template sequence.

[0266] In one embodiment, the method of editing genetic material is a method of editing a gene. In one embodiment, the gene is located in the genome of the cell. In one embodiment, the method of editing genetic material is a method of editing a nucleic acid.

[0267] In one embodiment, the invention provides methods of inserting a donor template sequence into a target sequence. In one embodiment, the method inserts a donor template sequence into a target sequence in a cell. In one embodiment, the method comprises administering to the cell a nucleic acid molecule encoding a fusion protein; a guide nucleic acid comprising a targeting nucleotide sequence complimentary to a region in the target sequence; and a donor template nucleic acid comprising a U3 sequence, a U5 sequence and the donor template sequence. In one embodiment, the method comprises administering to the cell a fusion protein; a guide nucleic acid comprising a targeting nucleotide sequence complimentary to a region in the target sequence; and a donor template nucleic acid comprising a U3 sequence, a U5 sequence and the donor template sequence.

[0268] Targeted delivery of large DNA sequences for genome editing using CRISPR-Cas9 mediated HDR remains inefficient. However, the present invention provides methods for inserting a large donor template sequence into a target sequence in a cell. In one embodiment the method inserts donor template sequence at least 1 kb or more, at least 2 kb or more, at least 3 kb or more, at least 4 kb or more, at least 5 kb or more, at least 6 kb or more, at least 7 kb or more, at least 8 kb or more, at least 9 kb or more, at least 10 kb or more, at least 11 kb or more, at least 12 kb or more, at least 13 kb or more, at least 14 kb or more, at least 15 kb or more, at least 16 kb or more, at least 17 kb or more, or at least 18 kb or more. In one embodiment, the method comprises administering to the cell a fusion protein or a nucleic acid molecule encoding a fusion protein; a guide nucleic acid comprising a targeting nucleotide sequence complimentary to a region in the target sequence; and a donor template nucleic acid comprising a U3 sequence, a U5 sequence and the donor template sequence.

[0269] In one embodiment, the target sequence is located within a gene. In one embodiment, the donor template sequence disrupts the sequence of a gene thereby inhibiting or reducing the expression of the gene. In one embodiment, target sequence has a mutation and the donor template sequence inserts a corrected sequence into the target sequence, thereby correcting the gene mutation. In one embodiment, the donor template sequence is a gene sequence and inserting the donor template sequence into a target sequence in a cell allows for expression of the gene.

[0270] In one embodiment, the donor template sequence is inserted into a safe harbor site. Thus, in one embodiment, the guide nucleic acid comprising a nucleotide sequence complimentary to a safe harbor region in the gene. Safe harbor regions allow for expression of a therapeutic gene without affecting neighbor gene expression. Safe harbor regions may include intergenic regions apart from neighbor genes ex. H11, or within ‘non-essential’ genes, ex. CCR5, hROSA26 or AAVSL. Exemplary safe harbor regions and guide nucleic acid sequences complementary to these sequences can be found, for example in Pellenz et al., New Human Chromosomal Sites with “Safe Harbor” Potential for Targeted Transgene Insertion, 2019, Hum Gene Ther 30(7):814-28, which is herein incorporated by reference.

[0271] In one embodiment, the donor template sequence is inserted into a 3′ untranslated region (UTR) allowing the expression of the donor template sequence to be controlled by the the promoters of other genes.

[0272] In one embodiment, the nucleic acid molecule comprises a first nucleic acid sequence encoding a retroviral integrase (IN), or a fragment thereof, a second nucleic acid sequence encoding a CRISPR-associated (Cas) protein; and a third nucleic acid sequence encoding a nuclear localization signal (NLS).

[0273] In one embodiment, the retroviral IN is human immunodeficiency virus (HIV) IN, Rous sarcoma virus (RSV) IN, Mouse mammary tumor virus (MMTV) IN, Moloney murine leukemia virus (MoLV) IN, bovine leukemia virus (BLV) IN, Human T-lymphotropic virus (HTLV) IN, avian sarcoma leukosis virus (ASLV) IN, feline leukemia virus (FLV) IN, xenotropic murine leukemia virus-related virus (XMLV) IN, simian immunodeficiency virus (SIV) IN, feline immunodeficiency virus (FIV) IN, equine infectious anemia virus (EIAV) IN, Prototype foamy virus (PFV) IN, simian foamy virus (SFV) IN, human foamy virus (HFV) IN, walleye dermal sarcoma virus (WDSV) IN, or bovine immunodeficiency virus (BIV) IN.

[0274] In one embodiment, the retroviral IN is HIV IN. In one embodiment, the HIV IN comprises one or more amino acid substitutions, wherein the substitution improves catalytic activity, improves solubility, or increases interaction with one or more host cellular cofactors. In one embodiment, HIV IN comprises one or more amino acid substitutions selected from the group consisting of E85G, E85F, D116N, F185K, C280S, T97A, Y134R, G140S, and Q148H. In one embodiment, HIV IN comprises amino acid substitutions F185K and C280S. In one embodiment, HIV IN comprises amino acid substitutions T97A and Y134R. In one embodiment, HIV IN comprises amino acid substitutions G140S and Q148H.

[0275] In one embodiment, the retroviral IN fragment comprises the IN N-terminal domain (NTD), and the IN catalytic core domain (CCD). In one embodiment, the retroviral IN fragment comprises the IN CCD and the IN C-terminal domain (CTD). In one embodiment, the retroviral IN fragment comprises the IN NTD. In one embodiment, the retroviral IN fragment comprises the IN CCD. In one embodiment, the retroviral IN fragment comprises the IN CTD.

[0276] In one embodiment, the first nucleic acid sequence encoding a retroviral IN comprises a nucleic acid sequence encoding a sequence at least 95% identical to one of SEQ ID NOs:1-40. In one embodiment, the first nucleic acid sequence encoding a retroviral IN comprises a nucleic acid sequence encoding a sequence at least 96% identical to one of SEQ ID NOs:1-40. In one embodiment, the first nucleic acid sequence encoding a retroviral IN comprises a nucleic acid sequence encoding a sequence at least 97% identical to one of SEQ ID NOs:1-40. In one embodiment, the first nucleic acid sequence encoding a retroviral IN comprises a nucleic acid sequence encoding a sequence at least 98% identical to one of SEQ ID NOs:1-40. In one embodiment, the first nucleic acid sequence encoding a retroviral IN comprises a nucleic acid sequence encoding a sequence at least 99% identical to one of SEQ ID NOs:1-40. In one embodiment, the first nucleic acid sequence encoding a retroviral IN comprises a nucleic acid sequence encoding one of SEQ ID NOs:1-40.

[0277] In one embodiment, the first nucleic acid sequence encoding a retroviral IN comprises a nucleic acid sequence at least at least 95% identical to one of SEQ ID NOs:99-138. In one embodiment, the first nucleic acid sequence encoding a retroviral IN comprises a nucleic acid sequence at least at least 96% identical to one of SEQ ID NOs:99-138. In one embodiment, the first nucleic acid sequence encoding a retroviral IN comprises a nucleic acid sequence at least at least 97% identical to one of SEQ ID NOs:99-138. In one embodiment, the first nucleic acid sequence encoding a retroviral IN comprises a nucleic acid sequence at least at least 98% identical to one of SEQ ID NOs:99-138. In one embodiment, the first nucleic acid sequence encoding a retroviral IN comprises a nucleic acid sequence at least at least 99% identical to one of SEQ ID NOs:99-138. In one embodiment, the first nucleic acid sequence encoding a retroviral IN comprises a nucleic acid sequence of one of SEQ ID NOs:99-138.

[0278] In one embodiment, the Cas protein is Cas9, Cas13, or Cpf1. In one embodiment, the Cas protein is catalytically deficient (dCas).

[0279] In one embodiment, the second nucleic acid sequence encoding a Cas protein comprises a nucleic acid sequence encoding a sequence at least 95% identical to one of SEQ ID NOs:41-46. In one embodiment, the second nucleic acid sequence encoding a Cas protein comprises a nucleic acid sequence encoding a sequence at least 96% identical to one of SEQ ID NOs:41-46. In one embodiment, the second nucleic acid sequence encoding a Cas protein comprises a nucleic acid sequence encoding a sequence at least 97% identical to one of SEQ ID NOs:41-46. In one embodiment, the second nucleic acid sequence encoding a Cas protein comprises a nucleic acid sequence encoding a sequence at least 98% identical to one of SEQ ID NOs:41-46. In one embodiment, the second nucleic acid sequence encoding a Cas protein comprises a nucleic acid sequence encoding a sequence at least 99% identical to one of SEQ ID NOs:41-46. In one embodiment, the second nucleic acid sequence encoding a Cas protein comprises a nucleic acid sequence encoding one of SEQ ID NOs:41-46.

[0280] In one embodiment, the second nucleic acid sequence encoding a Cas protein comprises a nucleic acid sequence at least at least 95% identical to one of SEQ ID NOs:139-144. In one embodiment, the second nucleic acid sequence encoding a Cas protein comprises a nucleic acid sequence at least at least 96% identical to one of SEQ ID NOs:139-144. In one embodiment, the second nucleic acid sequence encoding a Cas protein comprises a nucleic acid sequence at least at least 97% identical to one of SEQ ID NOs:139-144. In one embodiment, the second nucleic acid sequence encoding a Cas protein comprises a nucleic acid sequence at least at least 98% identical to one of SEQ ID NOs:139-144. In one embodiment, the second nucleic acid sequence encoding a Cas protein comprises a nucleic acid sequence at least at least 99% identical to one of SEQ ID NOs:139-144. In one embodiment, the second nucleic acid sequence encoding a Cas protein comprises a nucleic acid sequence of one of SEQ ID NOs:139-144.

[0281] In one embodiment, the NLS is a retrotransposon NLS. In one embodiment, the NLS is derived from yeast GAL4, SKI3, L29 or histone H2B proteins, polyoma virus large T protein, VP1 or VP2 capsid protein, SV40 VP1 or VP2 capsid protein, Adenovirus E1 a or DBP protein, influenza virus NS1 protein, hepatitis vims core antigen or the mammalian lamin, c-myc, max, c-myb, p53, c-erbA, jun, Tax, steroid receptor or Mx proteins, or simian vims 40 (“SV40”) T-antigen. In one embodiment, the NLS is a Ty1 or Ty1-derived NLS, a Ty2 or Ty2-derived NLS or a MAK11 or MAK11-derived NLS. In one embodiment, the Ty1 NLS comprises an amino acid sequence of SEQ ID NO:51. In one embodiment, the Ty2 NLS comprises an amino acid sequence of SEQ ID NO:254. In one embodiment, the MAK11 NLS comprises an amino acid sequence of SEQ ID NO:256.

[0282] In one embodiment, third nucleic acid sequence encoding a NLS comprises a nucleic acid sequence encoding a sequence at least 95% identical to one of SEQ ID NOs:47-56. In one embodiment, third nucleic acid sequence encoding a NLS comprises a nucleic acid sequence encoding a sequence at least 96% identical to one of SEQ ID NOs:47-56. In one embodiment, the third nucleic acid sequence encoding a NLS comprises a nucleic acid sequence encoding a sequence at least 97% identical to one of SEQ ID NOs:47-56. In one embodiment, third nucleic acid sequence encoding a NLS comprises a nucleic acid sequence encoding a sequence at least 98% identical to one of SEQ ID NOs:47-56. In one embodiment, third nucleic acid sequence encoding a NLS comprises a nucleic acid sequence encoding a sequence at least 99% identical to one of SEQ ID NOs:47-56. In one embodiment, third nucleic acid sequence encoding a NLS comprises a nucleic acid sequence encoding one of SEQ ID NOs:47-56.

[0283] In one embodiment, third nucleic acid sequence encoding a NLS comprises a nucleic acid sequence at least at least 95% identical to one of SEQ ID NOs:145-154. In one embodiment, third nucleic acid sequence encoding a NLS comprises a nucleic acid sequence at least at least 96% identical to one of SEQ ID NOs:145-154. In one embodiment, third nucleic acid sequence encoding a NLS comprises a nucleic acid sequence at least at least 97% identical to one of SEQ ID NOs:145-154. In one embodiment, third nucleic acid sequence encoding a NLS comprises a nucleic acid sequence at least at least 98% identical to one of SEQ ID NOs:145-154. In one embodiment, third nucleic acid sequence encoding a NLS comprises a nucleic acid sequence at least at least 99% identical to one of SEQ ID NOs:145-154. In one embodiment, third nucleic acid sequence encoding a NLS comprises a nucleic acid sequence of one of SEQ ID NOs:145-154.

[0284] In one embodiment, the nucleic acid molecule encodes a fusion protein comprising a sequence at least 95% identical to one of SEQ ID NOs:57-98. In one embodiment, the nucleic acid molecule encodes a fusion protein comprising a sequence at least 96% identical to one of SEQ ID NOs:57-98. In one embodiment, the nucleic acid molecule encodes a fusion protein comprising a sequence at least 97% identical to one of SEQ ID NOs:57-98. In one embodiment, the nucleic acid molecule encodes a fusion protein comprising a sequence at least 98% identical to one of SEQ ID NOs:57-98. In one embodiment, the nucleic acid molecule encodes a fusion protein comprising a sequence at least 99% identical to one of SEQ ID NOs:57-98. In one embodiment, the nucleic acid molecule encodes a fusion protein comprising a sequence of one of SEQ ID NOs:57-98.

[0285] In one embodiment, the nucleic acid molecule comprises a nucleic acid sequence at least 95% identical to one of SEQ ID NOs:155-196. In one embodiment, the nucleic acid molecule comprises a nucleic acid sequence at least 96% identical to one of SEQ ID NOs:155-196. In one embodiment, the nucleic acid molecule comprises a nucleic acid sequence at least 97% identical to one of SEQ ID NOs:155-196. In one embodiment, the nucleic acid molecule comprises a nucleic acid sequence at least 98% identical to one of SEQ ID NOs:155-196. In one embodiment, the nucleic acid molecule comprises a nucleic acid sequence at least 99% identical to one of SEQ ID NOs:155-196. In one embodiment, the nucleic acid molecule comprises a nucleic acid sequence of one of SEQ ID NOs:155-196.

[0286] In one embodiment, the U3 sequence and U5 sequence are specific to the retroviral IN.

[0287] In some embodiments, the gene is any target gene of interest. For example in one embodiment, the gene is any gene associated an increase in the risk of having or developing a disease. In some embodiments, the method comprises introducing the nucleic acid molecule encoding a fusion protein; the guide nucleic acid comprising a targeting nucleotide sequence complimentary to a target region in the gene; and the donor template nucleic acid comprising a U3 sequence, a U5 sequence and a donor template sequence. In one embodiment, the IN-Cas9 fusion protein binds to a target polynucleotide to effect cleavage of the target polynucleotide within the gene. In one embodiment, the IN-Cas9 fusion protein is complexed with the guide nucleic acid that is hybridized to the target sequence within the target polynucleotide. In one embodiment, the IN-Cas9 fusion protein is complexed with the nucleic acid sequence coding a donor template nucleic acid. In one embodiment, the IN-Cas9 fusion protein is complexed with the nucleic acid sequence coding a guide nucleic acid. In one embodiment, the IN-Cas9 fusion protein is complexed with the nucleic acid sequence coding a guide nucleic acid and the nucleic acid sequence coding a donor template nucleic acid. In one embodiment, the IN-Cas9 fusion protein is complexed with the guide nucleic acid that is hybridized to the target sequence within the target polynucleotide and the donor template nucleic acid. In one embodiment, the IN-Cas9 fusion protein is complexed with the donor template nucleic acid. In one embodiment, the IN-Cas9 fusion protein is complexed with the guide nucleic acid. In one embodiment, the IN-Cas9 fusion protein is complexed with the guide nucleic acid and the donor template nucleic acid.

[0288] In some embodiments, the IN-Cas9 catalyzes the integration of the donor template into to the gene. In one embodiment, the integration introduces one or more mutations into the gene. In some embodiments, said mutation results in one or more amino acid changes in a protein expression from a gene comprising the target sequence.

[0289] In one embodiment, the IN-mediated integration of DNA sequences can occur in either direction in a target DNA sequence. In one embodiment, different combinations of Cas and IN retroviral class proteins are used to promote direction editing. For example, in one embodiment, a fusion of IN from a retroviral class is bound to a first catalytically dead Cas allowing for binding to a specific target sequence utilizing the Cas-specific guide-RNA. In one embodiment, the donor sequence comprises both HIV and BIV LTR sequences. Thus, in one embodiment, the sequence is integrated in a single orientation with the target DNA.

[0290] In one embodiment, flanking LoxP (Floxed) sequences are incorporated around a gene of interest. Including floxed sequences allows for CRE-mediated recombination and conditional mutagenesis. Current methods to generate Floxed alleles using CRISPR-Cas9 are inefficient. The most widely utilized approach is to use two guide-RNAs to induce DNA cleavage at flanking target sequences and Homology Direct Repair to insert ssDNA templates containing LoxP sequences. However, when using double sgRNAs to induce cleavage, the most favorable reaction is the deletion of intervening sequence, resulting in global gene deletion. Thus, in one embodiment, the use of Integrase-Cas-mediated gene insertion increases the efficiency of tandem insertion of DNA sequences. In one embodiment, the integration of a sequence containing inverted LoxP sequences allows for recombination of flanking LoxP sequences because IN-mediated integration may occur in either the direction.

### Methods of Treatment and Use

[0291] The present invention provides methods of treating, reducing the symptoms of, and/or reducing the risk of developing a disease or disorder and/or genetic modification to produce a desired phenotypic outcome. For example, in one embodiment, methods of the invention of treat, reduce the symptoms of, and/or reduce the risk of developing a disease or disorder in a mammal. In one embodiment, the methods of the invention of treat, reduce the symptoms of, and/or reduce the risk of developing a disease or disorder in a plant. In one embodiment, the methods of the invention of treat, reduce the symptoms of, and/or reduce the risk of developing a disease or disorder in a yeast organism.

[0292] In one embodiment, the disease or disorder is caused by one or more mutations in a genomic locus. Thus, in one embodiment, the disease or disorder is may be treated, reduced, or the risk can be reduced via introducing a nucleic acid sequence that corresponds to the wild type sequence of the region having the one or more mutations and/or introducing an element that prevents or reduces the expression of the genomic sequence having the one or more mutations. Thus, in one embodiment, the method comprises manipulation of a target sequence within a coding, non-coding or regulatory element of the genomic locus in a target sequence.

[0293] For example, in one embodiment, the disease is a monogenic disease. In one embodiment, the disease includes, but is not limited to, Duchenne muscular dystrophy (mutations occurring in Dystrophin), Limb-Girdle Muscular Dystrophy type 2B (LGMD2B) and Miyoshi myopathy (mutations occurring in Dysferlin), Cystic Fibrosis (mutations occurring in CFTR), Wilson's disease (mutations occurring in ATP7B) and Stargardt Macular Degeneration (mutations occurring in ABCA4).

[0294] The present invention also provides methods of modulating the expression of a gene or genetic material. For example, in one embodiment, the methods of the invention provide deliver a genetic material to confer a phenotype in a cell or organism. For example, in one embodiment, the method provides resistance to pathogens. In one embodiment, the method provides for modulation of metabolic pathways. In one embodiment, the method provides for the production and use of a material in an organism. For example, in one embodiment, the method generates a material, such as a biologic, a pharmaceutical, and a biofuel, in an organism such as a eukaryote, yeast, bacteria, or plant.

[0295] In one embodiment, the method comprises administering a fusion protein or a nucleic acid molecule encoding a fusion protein; a guide nucleic acid comprising a targeting nucleotide sequence complimentary to a target region in the gene; and a donor template nucleic acid comprising a U3 sequence, a U5 sequence. In one embodiment, the method further comprises administering a donor template sequence.

[0296] In one embodiment, the target sequence is located within a gene. In one embodiment, the donor template sequence disrupts the sequence of a gene thereby inhibiting or reducing the expression of the gene. In one embodiment, target sequence has a mutation and the donor template sequence inserts a corrected sequence into the target sequence, thereby correcting the gene mutation. In one embodiment, the donor template sequence is a gene sequence and inserting the donor template sequence into a target sequence in a cell allows for expression of the gene.

[0297] In one embodiment, the fusion protein comprises a CRISPR-associated (Cas) protein and a nuclear localization signal (NLS). In one embodiment, the fusion protein comprises a Cas protein, a NLS and a retroviral integrase (IN), or a fragment thereof.

[0298] In one embodiment, the retroviral IN is human immunodeficiency virus (HIV) IN, Rous sarcoma virus (RSV) IN, Mouse mammary tumor virus (MMTV) IN, Moloney murine leukemia virus (MoLV) IN, bovine leukemia virus (BLV) IN, Human T-lymphotropic virus (HTLV) IN, avian sarcoma leukosis virus (ASLV) IN, feline leukemia virus (FLV) IN, xenotropic murine leukemia virus-related virus (XMLV) IN, simian immunodeficiency virus (SIV) IN, feline immunodeficiency virus (FIV) IN, equine infectious anemia virus (EIAV) IN, Prototype foamy virus (PFV) IN, simian foamy virus (SFV) IN, human foamy virus (HFV) IN, walleye dermal sarcoma virus (WDSV) IN, or bovine immunodeficiency virus (BIV) IN.

[0299] In one embodiment, the retroviral IN is HIV IN. In one embodiment, the HIV IN comprises one or more amino acid substitutions, wherein the substitution improves catalytic activity, improves solubility, or increases interaction with one or more host cellular cofactors. In one embodiment, HIV IN comprises one or more amino acid substitutions selected from the group consisting of E85G, E85F, D116N, F185K, C280S, T97A, Y134R, G140S, and Q148H. In one embodiment, HIV IN comprises amino acid substitutions F185K and C280S. In one embodiment, HIV IN comprises amino acid substitutions T97A and Y134R. In one embodiment, HIV IN comprises amino acid substitutions G140S and Q148H.

[0300] In one embodiment, the retroviral IN fragment comprises the IN N-terminal domain (NTD), and the IN catalytic core domain (CCD). In one embodiment, the retroviral IN fragment comprises the IN CCD and the IN C-terminal domain (CTD). In one embodiment, the retroviral IN fragment comprises the IN NTD. In one embodiment, the retroviral IN fragment comprises the IN CCD. In one embodiment, the retroviral IN fragment comprises the IN CTD.

[0301] In one embodiment, the retroviral IN comprises a sequence at least 70%, at least 71%, at least 72%, at least 73%, at least 74%, at least 75%, at least 76%, at least 77%, at least 78%, at least 79%, 80%, at least 81%, at least 82%, at least 83%, at least 84%, at least 85%, at least 86%, at least 87%, at least 88%, at least 89%, 90%, at least 91%, at least 92%, at least 93%, at least 94%, at least 95%, at least 96%, at least 97%, at least 98%, or at least 99% identical to one of SEQ ID NOs:1-40. In one embodiment, the retroviral IN comprises a sequence of one of SEQ ID NOs:1-40.

[0302] In one embodiment, the nucleic acid encoding the retroviral IN comprises a nucleic acid sequence at least at least 70%, at least 71%, at least 72%, at least 73%, at least 74%, at least 75%, at least 76%, at least 77%, at least 78%, at least 79%, 80%, at least 81%, at least 82%, at least 83%, at least 84%, at least 85%, at least 86%, at least 87%, at least 88%, at least 89%, 90%, at least 91%, at least 92%, at least 93%, at least 94%, at least 95%, at least 96%, at least 97%, at least 98%, or at least 99% identical SEQ ID NOs:99-138. In one embodiment, the nucleic acid encoding the encoding a retroviral IN comprises a nucleic acid sequence of one of SEQ ID NOs:99-138.

[0303] In one embodiment, the Cas protein is Cas9, Cas13, or Cpf1. In one embodiment, the Cas protein is catalytically deficient (dCas).

[0304] In one embodiment, the Cas protein comprises sequence at least 70%, at least 71%, at least 72%, at least 73%, at least 74%, at least 75%, at least 76%, at least 77%, at least 78%, at least 79%, 80%, at least 81%, at least 82%, at least 83%, at least 84%, at least 85%, at least 86%, at least 87%, at least 88%, at least 89%, 90%, at least 91%, at least 92%, at least 93%, at least 94%, at least 95%, at least 96%, at least 97%, at least 98%, or at least 99% identical to one of SEQ ID NOs:41-46. In one embodiment, the Cas protein comprises a sequence of one of SEQ ID NOs:41-46.

[0305] In one embodiment, the nucleic acid sequence encoding a Cas protein comprises a nucleic acid sequence at least 70%, at least 71%, at least 72%, at least 73%, at least 74%, at least 75%, at least 76%, at least 77%, at least 78%, at least 79%, 80%, at least 81%, at least 82%, at least 83%, at least 84%, at least 85%, at least 86%, at least 87%, at least 88%, at least 89%, 90%, at least 91%, at least 92%, at least 93%, at least 94%, at least 95%, at least 96%, at least 97%, at least 98%, or at least 99% identical to one of SEQ ID NOs:139-144. In one embodiment, the nucleic acid sequence encoding a Cas protein comprises a nucleic acid sequence of one of SEQ ID NOs:139-144.

[0306] In one embodiment, the NLS is a retrotransposon NLS. In one embodiment, the NLS is derived from yeast GAL4, SKI3, L29 or histone H2B proteins, polyoma virus large T protein, VP1 or VP2 capsid protein, SV40 VP1 or VP2 capsid protein, Adenovirus E1 a or DBP protein, influenza virus NS1 protein, hepatitis vims core antigen or the mammalian lamin, c-myc, max, c-myb, p53, c-erbA, jun, Tax, steroid receptor or Mx proteins, or simian vims 40 (“SV40”) T-antigen. In one embodiment, the NLS is a Ty1 or Ty1-derived NLS, a Ty2 or Ty2-derived NLS or a MAK11 or MAK11-derived NLS. In one embodiment, the Ty1 NLS comprises an amino acid sequence of SEQ ID NO:51. In one embodiment, the Ty2 NLS comprises an amino acid sequence of SEQ ID NO:254. In one embodiment, the MAK11 NLS comprises an amino acid sequence of SEQ ID NO:256.

[0307] In one embodiment, NLS comprises a nucleic acid sequence encoding a sequence at least 70%, at least 71%, at least 72%, at least 73%, at least 74%, at least 75%, at least 76%, at least 77%, at least 78%, at least 79%, 80%, at least 81%, at least 82%, at least 83%, at least 84%, at least 85%, at least 86%, at least 87%, at least 88%, at least 89%, 90%, at least 91%, at least 92%, at least 93%, at least 94%, at least 95%, at least 96%, at least 97%, at least 98%, or at least 99% identical to one of SEQ ID NOs:47-56, 254-256 and 275-887. In one embodiment, NLS comprises a nucleic acid sequence encoding one of SEQ ID NOs: 47-56, 254-256 and 275-887.

[0308] In one embodiment, the nucleic acid sequence encoding a NLS comprises a nucleic acid sequence at least 70%, at least 71%, at least 72%, at least 73%, at least 74%, at least 75%, at least 76%, at least 77%, at least 78%, at least 79%, 80%, at least 81%, at least 82%, at least 83%, at least 84%, at least 85%, at least 86%, at least 87%, at least 88%, at least 89%, 90%, at least 91%, at least 92%, at least 93%, at least 94%, at least 95%, at least 96%, at least 97%, at least 98%, or at least 99% identical to one of SEQ ID NOs:145-154. In one embodiment, nucleic acid sequence encoding a NLS comprises a nucleic acid sequence of one of SEQ ID NOs:145-154.

[0309] In one embodiment, the fusion protein comprises a sequence at least 70%, at least 71%, at least 72%, at least 73%, at least 74%, at least 75%, at least 76%, at least 77%, at least 78%, at least 79%, 80%, at least 81%, at least 82%, at least 83%, at least 84%, at least 85%, at least 86%, at least 87%, at least 88%, at least 89%, 90%, at least 91%, at least 92%, at least 93%, at least 94%, at least 95%, at least 96%, at least 97%, at least 98%, or at least 99% identical to one of SEQ ID NOs:57-98. In one embodiment, the fusion protein comprises a sequence of one of SEQ ID NOs:57-98.

[0310] In one embodiment, the U3 sequence and U5 sequence are specific to the retroviral IN.

[0311] In some embodiments, the gene is any target gene of interest. For example, in one embodiment, the gene is any gene associated an increase in the risk of having or developing a disease. In some embodiments, the method comprises introducing the nucleic acid molecule encoding a fusion protein; the guide nucleic acid comprising a targeting nucleotide sequence complimentary to a target region in the gene; and the donor template nucleic acid comprising a U3 sequence, a U5 sequence and a donor template sequence. In one embodiment, the IN-Cas9 fusion protein binds to a target polynucleotide to effect cleavage of the target polynucleotide within the gene. In one embodiment, the IN-Cas9 fusion protein is complexed with the guide nucleic acid that is hybridized to the target sequence within the target polynucleotide. In one embodiment, the IN-Cas9 fusion protein is complexed with the nucleic acid sequence coding a donor template nucleic acid. In one embodiment, the IN-Cas9 fusion protein is complexed with the nucleic acid sequence coding a guide nucleic acid. In one embodiment, the IN-Cas9 fusion protein is complexed with the nucleic acid sequence coding a guide nucleic acid and the nucleic acid sequence coding a donor template nucleic acid. In one embodiment, the IN-Cas9 fusion protein is complexed with the guide nucleic acid that is hybridized to the target sequence within the target polynucleotide and the donor template nucleic acid. In one embodiment, the IN-Cas9 fusion protein is complexed with the donor template nucleic acid. In one embodiment, the IN-Cas9 fusion protein is complexed with the guide nucleic acid. In one embodiment, the IN-Cas9 fusion protein is complexed with the guide nucleic acid and the donor template nucleic acid.

[0312] In some embodiments, the IN-Cas9 catalyzes the integration of the donor template into to the gene. In one embodiment, the integration introduces one or more mutations into the gene. In some embodiments, said mutation results in one or more amino acid changes in a protein expression from a gene comprising the target sequence.

### EXPERIMENTAL EXAMPLES

[0313] The invention is further described in detail by reference to the following experimental examples. These examples are provided for purposes of illustration only and are not intended to be limiting unless otherwise specified. Thus, the invention should in no way be construed as being limited to the following examples, but rather, should be construed to encompass any and all variations which become evident as a result of the teaching provided herein.

[0314] Without further description, it is believed that one of ordinary skill in the art can, using the preceding description and the following illustrative examples, make and utilize the present invention and practice the claimed methods. The following working examples therefore, specifically point out certain embodiments of the present invention, and are not to be construed as limiting in any way the remainder of the disclosure.

### Example 1: Enhanced Nuclear Localization of Retroviral Integrase-dCas9 Fusion Proteins for Editing of Mammalian Genomic DNA

[0315] Efficient CRISPR-Cas9 editing of mammalian genomic DNA requires the nuclear localization of Cas9, a large, bacterial RNA-guided endonuclease that normally functions in prokaryotic cells lacking nuclear membranes. Efficient nuclear localization of Cas9 in mammalian cells has been shown to require the addition of at least two mammalian nuclear localization signals, one located at the N-terminus and one at the C-terminus (Cong et al., 2013, Science 339:819-23).

[0316] To promote nuclear localization of the retroviral Integrase-dCas9 fusion proteins for editing, an N-terminal SV40 NLS was included on Integrase, in addition to a C-terminal SV40 NLS on dCas9 (FIG. 1A). Surprisingly, when expressed in mammalian cells, only a small fraction of the IN-dCas9 fusion proteins were nuclear localized, as detected using a FLAG antibody recognizing the C-terminal 3×FLAG epitope on dCas9 (FIG. 1). Interestingly while the full-length IN-dCas9 fusion protein gave rise to cytoplasmic aggregates, deletion of the C-terminal domain of Integrase (INAC) resulted in greater solubility and increased nuclear localization (FIG. 1).

[0317] The fusion of retroviral Integrase to dCas9 appears to dramatically decrease its ability to localize to the nucleus. To further enhance the nuclear localization of IntegrasedCas9 fusion proteins, a number of different mammalian nuclear localization sequences were tested for their ability to direct IN-dCas9 nuclear import (FIG. 1). Multimerizing 3 copies of the SV40 NLS (3×SV40) had no apparent effect on the degree of nuclear localization of IN-dCas9 or INΔC-dCas9. However, the addition of the bipartite NLS from Nucleoplasmin (NPM) provided increased nuclear localization of the INΔC-dCas9 fusion protein, but not that of the full-length IN fusion protein. The combination of the 3×SV40 and NPM NLS appeared similar to NPM alone.

[0318] Interestingly, yeast LTR-retrotransposons (for example Ty1) are the evolutionary ancestors of retroviruses and replicate their genomes through reverse transcription of an RNA intermediate in the cytoplasm (Curcio et al., 2015, Microbiol Spectr 3:MDNA3-0053-2014). LTR-retrotransposons contain an integrase enzyme, which is required for the insertion of the retrotransposon genome. As opposed to higher eukaryotes which undergo open mitosis during cell division, yeast undergo closed mitosis, whereby their nuclear envelope remains intact. Thus, for Ty1 biogenesis, nuclear import of the integrase/retrotransposon genome complex requires active nuclear import. Thus, in contrast to mammalian Integrase enzymes, the Ty1 integrase contains a large C-terminal bipartite NLS which is required for retrotransposition (Moore et al., 1998, Mol Cell Biol 18:1105-14). Interestingly, the results presented herein demonstrate that fusion of the Ty1 NLS to the C-terminus of both IN-dCas9 fusion proteins provided robust nuclear localization in mammalian cells (FIG. 1).

[0319] The increased nuclear localization of INΔC-dCas9 fusion protein significantly enhanced editing in dividing mammalian cells in culture. The addition of the Ty1 NLS enhanced the activity of INΔC-dCas9 fusion protein to integrate an IRES-mCherry template targeted to the 3′UTRE of EF1-alpha in HEK293 cells (FIG. 1C). Utilizing the robust Ty1 NLS may further allow for editing in non-dividing cells, which always maintain a nuclear envelope (for example, in vivo therapeutic applications).

### Example 2: An Integrated Gene Editing Approach for the Correction of Muscular Dystrophy

[0320] As demonstrated elsewhere herein, fusion of lentiviral Integrase to CRISPR-Cas9 allows for the sequence-specific integration of large DNA sequences into genomic DNA. This approach can be utilized for the delivery of therapeutically beneficial genes to non-pathogenic genomic locations (safe harbors) for the permanent correction of human genetic diseases (FIG. 2). This technology allows for the sequence-specific integration of large DNA donor sequences containing short viral end motifs.

[0321] The major advantage of the gene therapy approach of the invention is the ability to deliver donor DNA sequences to targeted genome locations. Further, this approach eliminates the need for homology arms and relies on targeting by guide-RNAs, greatly simplifying genome editing. Thus, once a specific reporter donor sequence is generated, it can be guided to any location (or multiple locations) for diverse applications.

[0322] Fusion of lentiviral Integrase to dCas9 is sufficient to insert donor DNA sequences containing short viral termini to target sequences using CRISPR guide-RNAs in mammalian cells (FIG. 3). To monitor Integrase-Cas-mediated integration in mammalian cells, donor vector containing the IGR IRES sequence followed by an mCherry-2a-puromycin gene and an SV40 polyadenylation sequence were generated (FIG. 3). Next, sgRNAs targeting a stable human CMV-eGFP stable cell line in COS-7 cells were designed. The hCMV-eGFP stable transgene provided a heterologous target sequence which can be used to determine editing at a robustly expressed but non-essential expression locus. Donor mCherry-2a-puro templates were purified and co-transfected with sgRNAs and IN-dCas9 into the GFP stable cells and cultured for 48 hours. After 48 hours, mCherry-positive cells were visible in culture and replaced the GFP positive signal (FIG. 3).

[0323] Efficacy and Fidelity of Integrase-Cas-Mediated Integration of Human Dystrophin into Mammalian Genomes.

[0324] Integrase-Cas-mediated gene delivery directs the sequence-specific integration of large DNA sequences into mammalian genomic DNA. Integrase-Cas is used to deliver the human Dystrophin gene under the control of the Human α-Skeletal Actin (HSA) promoter to safe harbor locations using CRISPR guide-RNAs specific to human AAVS1 and mouse ROSA26 genomic DNA in cultured cells. Correct targeting of Dystrophin is assessed using PCR-based genotyping.

[0325] Integrase-Cas-Mediated Dystrophin Gene Therapy Restores Muscle Function in a Mouse Model of Duchenne Muscular Dystrophy.

[0326] The efficacy of Inscritpr-mediated delivery of human Dystrophin is determined in the MDX mouse line, the most commonly used mouse model for muscular dystrophy. Following systemic delivery, the levels of dystrophin expression are quantified and measured in limb skeletal muscle, heart and diaphragm using an anti-dystrophin antibody over a time-course of 2, 4 and 6 months. Mitigation of DMD disease pathogenesis is assessed by quantifying the levels of serum Creatine Kinase (CK) (a marker of skeletal muscle damage and diagnostic marker for DMD patients), grip strength and histological analyses of limb skeletal muscle, heart and diaphragm.

[0327] Histological Analyses of Gene Expression.

[0328] At 8 weeks of age, left hindlimb quadriceps muscle, heart, and diaphragm are harvested, weighed and fixed in 4% formaldehyde in PBS and processed using routine methods for paraffin histology. The percentage of myofibers expressing the HSA-dystrophin/GFP fusion protein is performed using an anti-GFP antibody in both DMD^{Mdx/y} and WT mice. The right hindlimb muscles are flash frozen in liquid nitrogen for subsequent PCR-based genotyping, gene expression by RT-PCR and protein expression analyses by western blot.

[0329] Integrase-Cas-Mediated Delivery Mitigates Disease Pathogenesis in a Mouse Model of Duschenne Muscular Dystrophy.

[0330] Haematoxylin and eosin (H&E), von Kossa and Masson's trichrome staining of transverse histological sections is used to identify myofibers containing centralized nuclei, mineralization and endomysial fibrosis, respectively. Quantitative comparisons and statistical analyses are used to compare the ratio of myofibers with centralized nuclei or compare the area of mineralization or fibrosis that is stained in quadriceps limb muscle. At least three different sectional planes are compared for each muscle, from 3 different mice of each genotype. Integrase-Cas treated Dmd^{mdx/y}, which mice show a less severe phenotype, have decreased ratio of myofibers with centralized nuclei and less total area of fibrosis and mineralization.

[0331] Serum Creatine Kinase (CK) Measurements.

[0332] Serum CK is a correlated marker of skeletal muscle damage and diagnostic marker for DMD patients. CK measurements are performed at 2, 4, 6, and 8 weeks on the above cohort of animals using non-lethal procedures. Briefly, blood ia harvested from the periorbital vascular plexus directly into microhematocrit tubes, allowed to clot at room temperature for 30 minutes and then centrifuged at 1,700×g for 10 minutes. Treated mice showing a less severe phenotype than Dmd^{mdx/y} KO, have significantly decreased serum CK levels,

### Example 3: Genome Editing—Directed Non-Homologous DNA Integration

[0333] The data presented herein demonstrates optimized Integrase-Cas to enable efficient editing of mammalian genomes.

[0334] Optimized Editing

[0335] To optimize IN-mediated integration, it is determined whether amino acid mutations that enhance Integrase catalytic activity, solubility, or interaction with host cellular cofactors enhance editing. Further, the efficiency and fidelity of IN proteins isolated from the seven unique classes of retrovirus are evaluated.

[0336] To quantify and characterize IN-dCas9 mediated integration in mammalian cells, a plasmid-based reporter system is used that utilizes the blue chromoprotein from the coral Acropora millepora (amilCP), which produces dark blue colonies when expressed in Escherichia coli. Disruption of the amilCP open reading frame abolishes blue protein expression, which can be used as a direct readout for targeting fidelity. Further, a donor template encoding the chloramphenicol antibiotic resistance gene, flanked by the U3 and U5 retroviral end sequences from HIV was generated. Integration of this donor template confers resistance to chloramphenicol, which can be utilized to monitor Integrase-Cas-mediated DNA integration. In this reporter assay, expression plasmids containing the IN-dCas9 fusion protein, sgRNAs targeting amilCP and donor template are co-transfected into mammalian COS-7 cells with the bacterial amilCP reporter. After 48 hours, total plasmid DNA is recovered using column purification and transformed into E. coli. IN-dCas9 is sufficient to integrate the chloramphenicol encoding template DNA into the amilCP reporter plasmid, thereby disrupting amilCP expression and conferring resistance to chloramphenicol. This rapid assay, which allows for quantification and clonal sequence analysis of individual integration events, is used for optimizing editing.

[0337] Enhancing Integrase Activity: While most mutations within IN abolish its activity, decades of past research have identified a few mutations which enhance IN integration by increasing IN catalytic activity (D116N), dimerization (E85F), solubility (F185K/C280S) and interaction with host cellular proteins (K71R). IN-dCas9 fusion proteins containing activating IN mutations are used to determine if this enhances activity using the plasmid-based reporter assay.

[0338] Modification of Integrase activity by host cellular proteins: While IN is the only protein necessary and sufficient to integrate proviral DNA in vitro, interactions with host cellular proteins can greatly alter IN-mediated DNA integration18. Notably, LEDGF/p75, VBP1, and SNF5 are a well-characterized HIV IN interacting proteins which can promote IN-mediated integration. These factors are expressed using the plasmid reporter assay to determine if they enhance donor template integration.

[0339] Compare and contrast Integrases from different retroviral classes: While all IN enzymes from retroviral classes contain the conserved core catalytic D,D(35)E residues, they differ greatly in genome size, complexity, U3 and U5 terminal sequences and DNA joining efficiencies. To determine the editing efficiencies of different retroviral INs, model examples from each retroviral class are cloned as a fusion to dCas9, including Alpha (RSV), Beta (MMTV), Gamma (MoLV), Delta (BLV), Epsilon (WDSV) and Spumavirus (HFV). Donor plasmids are generated containing their respective U3 and U5 terminal motifs. Protein expression is verified by western blot and nuclear localization is verified using immunocytochemistry using a FLAG antibody to detect the 3×FLAG epitope located on the C-terminus of dCas9.

[0340] Efficiency of Editing of Mammalian Genomic DNA

[0341] The efficacy and fidelity of editing of mammalian genomic DNA is determined using a stable CMV-driven GFP reporter cell-line and generate a donor template containing an RFP and puromycin selection cassette. Integration events are quantified and clonally characterized to determine the efficacy and fidelity of the method as a novel genome editing technology.

[0342] Generation of a cell-based reporter assay: To quantify integration events at this locus, a donor template is used containing an IRES-RFP-2A-puromycin cassette and guide-RNAs targeting the GFP coding sequence. Upon insertion of the donor cassette into the CMV-GFP locus, RFP expression replaces GFP expression and provides resistance to the antibiotic puromycin. The efficiency and fidelity of Inscripr editing is quantified using FACS sorting to determine the percentage of cells that are RFP+/GFP− (targeted integration) after transfection and 48 hours of culture. Puromycin is used to select for clonal integration events, which is characterized using PCR primers to amplify the sequences between the GFP locus and the donor cassette.

[0343] Editing at multiple endogenous loci: Integrase-Cas is used to knock-in the RFP-2Apuromycin cassette using sgRNAs specific to the CMV-GFP locus and to the 3′UTR of the human EF1-alpha locus in the HEK293 human cell line. Targeting the 3′UTR allows for expression of the IRES-dependent vector, while not disrupting normal gene expression. After clonal selection using puromycin, PCR-genotyping is used to determine the percentage of clones that have integrated the donor template at both loci.

### Example 4: Generation and Characterization of Incriptr

### Generation of a Functional IN-dCas9 Fusion Protein.

[0344] To generate a functional IN-dCas9 fusion protein for use in mammalian cells, full-length retroviral IN was cloned from HIV-1 (amino acids 1148-1435 of the gag-pol polyprotein), separated by a flexible 15 amino acid linker [(GGGGS)3)] to the N-terminus of human codon-optimized dCas9 (FIG. 6). An SV40 nuclear localization signal (NLS) was included at the N-terminus of IN, which together with the C-terminal SV40 NLS on dCas9, provided nuclear localization of the IN-dCas9 fusion protein. To generate an IN-dCas9 fusion lacking the C-terminal non-specific DNA binding domain, an additional construct was generated containing only the N-terminal and catalytic core domains of IN (a.a. 1148-1369) as an N-terminal fusion to dCas9 (FIG. 6).

### Generation of a Reporter for Monitoring Editing of Plasmid DNA.

[0345] To quantify and characterize IN-dCas9 mediated integration in mammalian cells, a plasmid-based reporter assay was designed that utilizes the blue chromoprotein from the coral Acropora millepora (amilCP), which produces dark blue colonies when expressed in Escherichia coli (FIG. 6). Disruption of the amilCP open reading frame abolishes blue protein expression, which can be used as a direct readout for targeting fidelity and as a target DNA for Integrase-Cas-mediated integration. Single guide-RNA (sgRNA) target sequences were designed with a ‘PAM-out’ orientation separated by 16 bp spacer sequence, to promote efficient dimerization of the N-terminal dCas9 fusion protein at target DNA (FIG. 4).

### Generation of a Viral-End Donor Sequences for Integrase-Cas-Mediated Integration.

[0346] To construct a targeting vector that could be used to generate donor sequences for Integrase-Cas-mediated integration, the 30 base pairs encompassing the U3 and U5 HIV termini were subcloned into pCRII (FIG. 6). To facilitate subcloning of donor sequences, a multiple cloning site containing 9 unique restriction enzymes was included between U3 and U5. Since U3 and U5 share the same 3 nucleotides at their termini (ACT and AGT respectively) additional half-site sequences were included to generate ScaI restrictions sites at each end that could be used to generate bluntend donor sequences from the plasmid backbone (FIG. 6). Additionally, flanking Type IIS restriction enzyme sites were included for FauI, which cuts and leaves a two 5′ nucleotide overhang, mimicking the 3′ pre-processed viral end with exposed CA dinucleotide (FIG. 6). To aid in the gel purification and separation of FauI-digested templates from plasmid backbone, multisite directed mutagenesis was used to remove the six FauI sites present in the pCR II plasmid backbone.

### Protocol: Preparing INsrt Donor Templates for Transfection

[0347] 1) Set up restriction digest of INsrt plasmid DNA
[0348] 2) Restriction digest reaction
[0349] 3) Gel purify the donor template from backbone DNA
[0350] 4) Eluted Donor DNA for transfection.
   Integrase-Cas-Mediated Integration of Donor Sequences into Plasmid DNA in Mammalian Cells.

[0351] To allow for positive selection of concerted IN-dCas9-mediated integration, a INsrt donor vector was designed carrying the chloramphenicol resistance gene (CAT), which is not present in the reporter of expression plasmids (FIG. 7). The IGR IRES from the Plautia stali intestine virus (PSIV) was included in front of the CAT gene, which can initiate translation in both prokaryote and eukaryote cells, to aid in translation at multiple sites of integration. Templates containing the chloramphenicol resistance gene and viral termini were digested using either ScaI (Blunt ends) or FauI (processed ends) and gel purified from plasmid backbone DNA. Co-transfection of the INsrt templates, the IN-dCas9 vectors targeting the amilCP sequence were co-transfected into Cos 7 cells (FIG. 7). After 48 hours, total plasmid DNA was recovered using column purification and transformed into E. coli. Chloramphenicol resistance clones were observed for both full length IN and INDC-dCas9 fusion proteins. Sequencing of the plasmids revealed the IG3-CAT plasmid sequence had integrated into the amilCP reporter. Interestingly, the use of FauI digested donor sequences, which mimic pre-3′processing of viral DNA ends, resulted in twice as many chloramphenicol resistance clones compared to ScaI digested blunt-end templates. Integrase-Cas-mediated integration contained hallmarks of HIV IN lentiviral integration, including a 5 base pair repeat of host DNA flanking the integration site. Interestingly, the integration site did not occur between the two sgRNA target sites but occurred on either side of the amilCP target sequence.

[0352] Integration of Insrt IGR-CAT donor template with either blunt ends (ScaI cleaved) or 3′ Processing mimic (FauI cleaved) ends into pCRII-amilCP reporter in mammalian cells. Interestingly, deletion of the C-terminal non-specific DNA binding domain, as a fusion to dCas9, does not inhibit Integrase-Cas mediated integration. Use of ends that mimic 3′ Processing show ˜2 fold increase in CAT resistant clones. (FIG. 29B) Dimerization inhibiting mutations (E85G and E85F) do not disrupt Integrase-Cas-mediated integration using double guide-RNA targeted integration of IGR-CAT donor template into amilCP. However, the IN E87G mutation cannot be rescued by paired targeting sgRNAs. Interestingly, a tandem INAC fusion to dCas9 (tdINΔC-dCas9) shows ˜2 fold enhanced integration (FIG. 29C).

Protocol: Integrase-Cas-Mediated Integration of Donor Sequences into Plasmid DNA in Mammalian Cells
[0353] 1) Co-transfect the multicistronic sgRNA and IN-dCas9 plasmid, bacterial amilCP reporter plasmid and INsrt donor template into mammalian (ex. Cos 7) cells.
   [0354] a. Set up transfection reaction immediately before plating cells.
   [0355] b. Harvest and plate and transfect cells
[0356] 2) Recover plasmid DNA from transfected cells:
[0357] 3) Transform recovered plasmid DNA into chemically competent E. coli.
   Generation of a CMV-GFP Stable Mammalian Cell Line for Integrase-Cas-Mediated Integration into Genomic DNA.

[0358] A stable GFP reporter cell line was generated that can be used to quantify and characterize the fidelity of individual integration events in mammalian cells (FIG. 3). A plasmid encoding GFP under the control of the human CMV promoter (pcDNA3.1-GFP) was linearized and transfected into Cos 7 cells and stable clones were selected using G418 and serial dilution. This artificial locus allows for robust gene expression which can be targeted for disruption without compromising the normal cell viability, which otherwise could occur when targeting an essential host gene.

Integrase-Cas-Mediated Integration of Donor Sequences into Mammalian Genomic DNA.

[0359] To quantify integration events at the CMV-GFP locus, a donor template was constructed containing an IGR-mCherry-2A-puromycin-pA cassette and paired guide-RNAs targeting the GFP coding sequence (FIG. 3). Integration of the donor cassette into the CMV-GFP locus will drive mCherry expression and disrupt GFP expression and provide resistance to the antibiotic puromycin. After transfection and 48 hours of culture, mCherry-positive cells were observed, some of which still contained weak but detectable levels of GFP expression (FIG. 3).

### Integrase-Cas-Mediated Integration of Donor Sequences at an Endogenous Locus.

[0360] A targeting strategy was designed and guide-RNAs specific the 3′UTR of the human EF1-alpha locus were selected to knock-in the IGR-mCherry-2A-puromycin-pA cassette into the human HEK293 cell line (FIG. 8). The 3′UTR was targeted to allow for expression of the IGR-mCherry cassette, while not disrupting the open reading frame of the EF1-alpha expression. After transfection and 48 hours of culture, mCherry-positive cells were observed in culture (FIG. 8).

Protocol: Integrase-Cas-Mediated Integration of Donor Sequences into Mammalian Genomic DNA
[0361] 1) Co-transfect plasmids encoding sgRNAs, IN-dCas9 and INsrt donor template 1:1:1 into mammalian cells (COS 7, HEK293, etc) using Fugene6 or Lipofectamine2000.
   [0362] a. Harvest, plate, and transfect cells.
[0363] 2) Antibiotic Selection for integrated sequences
   [0364] a. Wash cells with and plate in 10 mls of media containing antibiotic selection
   [0365] b. Culture cells, then generate clones.

### Directional Editing.

[0366] IN-mediated integration of DNA sequences can occur in either direction in a target DNA sequence. Utilizing different combinations of Cas and IN retroviral class proteins provides the ability to promote direction editing. For example, a fusion of IN from BIV (Bovine Immunodeficiency virus, or other HIV related virus) fused to catalytically dead LbCpf1 (LbCpf1) allows for binding to a specific target sequence utilizing a Cpf1-specific guide-RNA. Utilizing a donor sequence containing both HIV and BIV terminal sequences lock binding to a single orientation with the target DNA. (FIG. 9).

### Multiplex Genome Editing for the Generation of Floxed Alleles.

[0367] The incorporation of flanking LoxP (Floxed) sequences around a gene of interest allows for CRE-mediated recombination and conditional mutagenesis. Current methods to generate Floxed alleles using CRISPR-Cas9 are inefficient. The most widely utilized approach is to use two guide-RNAs to induce DNA cleavage at flanking target sequences and Homology Direct Repair to insert ssDNA templates containing LoxP sequences. However, when using double sgRNAs to induce cleavage, the most favorable reaction is the deletion of intervening sequence, resulting in global gene deletion. The use of Integrase-Cas-mediated gene insertion provides an alternative and more efficient approach for tandem insertion of DNA sequences if IN-mediated strand transfer with host DNA does not allow for efficient deletion of intervening sequences. Since IN-mediated integration may occur in either the direction, Integration of a sequence containing inverted LoxP sequences allows for recombination of flanking LoxP sequences (FIG. 10).

### Example 5: Identification and Activity of Ty1 NLS-Like Sequences

[0368] The integrase enzyme from the yeast Ty1 retrotransposon contains a non-classical bipartite nuclear localization signal, comprised of tandem KKR motifs separated by a larger linker sequence. Previous studies in yeast have demonstrated the necessity of these basic motifs for nuclear localization and Ty1 transposition (Kenna et al., 1998, Mol Cell Biol 18, 1115-1124; Moore et al., 1998, Mol Cell Biol 18, 1105-1114). Ty1 transposition is absolutely dependent on the presence of the Ty1 NLS, and interestingly, a classic NLS is insufficient to recapitulate Ty1 NLS activity required for transposition. Interestingly, additional yeast proteins share this tandem KKR motif, which may serve to function as an NLS given that many of these proteins are nuclear localized (Kenna et al., 1998, Mol Cell Biol 18, 1115-1124).

[0369] As demonstrated in Example 1, the yeast Ty1 NLS provides robust nuclear localization of Cas proteins and Cas-fusion proteins in mammalian cells. To determine if this activity is a unique feature of the Ty1 NLS, it was tested whether the closely related NLS from Ty2 Integrase and other yeast Ty1 NLS-like motifs were sufficient to localize an Integrase-dCas9 fusion protein (INΔC-Cas9) to the nucleus in mammalian cells. Interestingly, the Ty2 NLS, which is highly conserved to the Ty1 NLS, was equally as efficient for nuclear localization as the Ty1 NLS (FIG. 11). Fusion of three different Ty1 NLS-like sequences identified in yeast (Kenna et al., 1998), which diverge from Ty1/Ty2 NLS sequences, showed either robust NLS activity (MAK11) or no apparent NLS activity (INO4 and STH1). The MAK11 sequence is derived from a yeast nuclear protein, which also occurs at the C-terminus of the protein were further screen, suggesting this sequence indeed functions as NLS. All proteins in the SWISS-PROT Protein Sequence Databank using the motif KKR_{N20-40}KKR, which identified a large number of potential Ty1 NLS-like sequences across diverse species (SEQ ID NOs:275-887). These data demonstrate that other Ty1 NLS-like sequences may have robust NLS activities and maybe useful for localization of proteins (including Cas and Cas-fusion proteins) in dividing and non-dividing eukaryotic cells.

### Example 6: Enhanced CRISPR-Cas9 DNA Editing with the Ty1 NLS

[0370] CRISPR-Cas DNA cleavage systems are derived from bacteria and Cas proteins are both large and lack intrinsic mammalian nuclear localization signals (NLSs), preventing their efficient nuclear localization in mammalian cells. Previously it has been shown that the addition of two classical nuclear localization signals (an N-terminal SV40 and C-terminal nucleoplasmin (NPM) bi-partite NLS) were required for efficient nuclear localization and editing of DNA by CRISPR-Cas9 in mammalian cells (Cong et al., 2013, Science 339, 819-823). Due to the robust nature of the non-classical yeast retrotransposon Ty1 NLS for localizing Cas fusion proteins in mammalian cells (Example 1), it was tested whether the Ty1 NLS could also function to enhance the editing efficiency of traditional CRISPR-Cas9 in mammalian cells.

[0371] To determine if Ty1 enhances CRISPR-Cas9 editing, an existing CRISPR-Cas9 expression plasmid (px330) was modified by replacing the C-terminal NPM NLS with the non-classical Ty1 NLS (px330-Ty1) (FIG. 12A). Next, a frameshift-responsive luciferase reporter was generated, which encodes an out-of-frame luciferase coding sequence downstream of a target sequence (ts) (FIG. 12B). For this reporter assay, cleavage near the target sequence and imperfect repair by the cellular non-homologous end joining (NHEJ) pathway can induce nucleotide insertions or deletions which have the potential to re-frame the luciferase coding sequence and result in luciferase expression.

[0372] Co-expression of the Luciferase reporter with a vector encoding Cas9 containing the NPM NLS and a single guide-RNA specific to a 20 nucleotide target sequence resulted in a ˜20-fold increase in luciferase activity over background, relative to a non-targeting guide-RNA (FIG. 12C). Notably, expression of Cas9 containing the Ty1 NLS resulted in a significant (˜44%) enhancement in reporter activity in COS-7 cells, compared to Cas9 containing the NPM NLS (FIG. 12C).

### Example 7: Genome Targeting Strategies for Editing

[0373] Targeted integration of DNA donor sequences using an Integrase-DNA-binding fusion protein can be targeted to different locations within the genome depending upon the desired outcomes. For example, therapeutic DNA Donor sequences consisting of a gene expression cassette (ex, promoter, gene sequence and transcriptional terminator) may be targeted to ‘safe harbor’ locations (for review and list of safe harbor sites in the human genome, see Pellenz et al., 2019, Hum Gene Ther 30, 814-828), which would allow for expression of a therapeutic gene without affecting neighbor gene expression. These may include intergenic regions apart from neighbor genes ex. H11, or within ‘non-essential’ genes, ex. CCR5, hROSA26 or AAVS1 (FIGS. 13A and 13b).

[0374] To restore expression of a disease causing gene mutation, targeted integration of a therapeutic gene sequence into the endogenous disease gene locus may be advantageous, since this locus is already defective and the spatial and temporal expression of this locus is under endogenous regulatory control. In one iteration, a DNA donor sequence encoding a therapeutic gene containing a splice acceptor could be integrated into the first intron of the endogenous gene locus, such that splicing would 1) allow for expression of the introduced gene sequence and 2) prevent downstream expression of the mutated sequence (due to termination from an integrated poly(A) sequence or LTR sequence (FIG. 13C). Smaller DNA donor sequences could be delivered or expressed if this is targeted to a downstream intron (FIG. 13D).

[0375] Targeted insertion of a DNA donor sequence containing an IRES sequence into a 3′ untranslated region (3′UTR) of a gene may be beneficial in that this approach would allow for expression in the same spatial and temporal expression as the targeted locus and would be less likely to disrupt the targeted gene locus (FIG. 13E).

### Example 8: Targeted Lentiviral Integration into Mammalian Genomes Using CRISPR-CAS

[0376] The data presented herein demonstrates three different approaches for the delivery and targeted integration of lentiviral donor sequences into mammalian genomes.

### Lentivirus Life Cycle

[0377] Lentiviruses are single-stranded RNA viruses which integrate a permanent double-stranded DNA (dsDNA) copy of their proviral genomes into host cellular DNA (FIG. 14). Lentiviral genomes are flanked by long terminal repeat (LTR) sequences which control viral gene transcription and contain short (˜20 base pair) sequence motifs at their U3 and U5 termini required for proviral genome integration. Subsequent to viral infection, lentiviral RNA genomes are copied as blunt-ended dsDNA by viral-encoded reverse transcriptase (RT) and inserted into host genomes by Integrase (IN). IN consists of three functional domains which are essential for IN activity, including a C-terminal domain that binds non-specifically to DNA (CTD). IN-mediated insertion of retroviral DNA occurs with little DNA target sequence specificity and can integrate into active gene loci, which can disrupt normal gene function and has the potential to cause disease in humans. This limits the utility of lentiviral vectors for gene therapy, despite the benefits of a large sequence carrying capacity.

### Genome Editing

[0378] CRISPR-Cas9 allows for programmable DNA targeting by utilizing short single guide-RNAs to recognize and bind DNA. Catalytically inactive Cas9 (dCas9) retains the ability to target DNA and has been recently repurposed as a programmable DNA binding platform for diverse applications for genome interrogation and regulation. As demonstrated in example 1, fusion of lentiviral Integrase to dCas9 is sufficient to insert donor DNA sequences containing short viral termini to target sequences using CRISPR guide-RNAs in mammalian cells (FIG. 15). To monitor Integrase-Cas-mediated integration in mammalian cells, donor vector were generated containing the IGR IRES sequence followed by an mCherry-2a-puromycin gene and an SV40 polyadenylation sequence (FIG. 15B). sgRNAs targeting a stable human CMV-eGFP stable cell line in COS-7 cells were designed (FIGS. 15C and 15D). The hCMV-eGFP stable transgene provided a heterologous target sequence which can be used to determine editing at a robustly expressed but non-essential expression locus. Donor mCherry-2a-puro templates were purified and co-transfected with sgRNAs and IN-dCas9 into the GFP stable cells and cultured for 48 hours. After 48 hours, mCherry-positive cells were visible in culture and replaced the GFP positive signal (FIG. 15E). Incorporating editing components (Integrase-CRISPR-Cas9 fusions) into lentiviral particles allows for targeted and readily programmable lentiviral genome integration into host DNA, thereby eliminating a major limitation of lentiviral gene therapy (i.e. non-specific lentiviral integration). This approach is useful for both basic research and therapeutic applications.

### Lentiviral Gene Delivery Systems

[0379] Lentiviral vectors have been adapted as robust gene delivery tools for research applications (FIG. 16). Lentiviral structural and enzymes proteins are transcribed and translated as large polyproteins (gag-pol and envelope) (FIG. 16A). Upon incorporation into budding viral particles, the polyproteins are processed by viral protease into individual proteins. For lentiviral vector gene expression systems, theses polyproteins are removed from the viral genome and expressed using separate mammalian expression plasmids (FIG. 16B). Donor DNA sequences of interest can then be cloned in place of viral polyproteins between the flanking LTR sequences. Co-transfection of these vectors in mammalian cells allows for the formation of lentiviral particles capable of delivering and integrating the encoded donor sequence, however do not require the coding information for Integrase and other viral proteins necessary for subsequent viral propagation (FIG. 16B). Lentiviral particles are a natural vector for the delivery of both viral proteins (ex. integrase and reverse transcriptase) and dsDNA donor sequences, which contain the necessary viral end sequences required for integrase-mediated insertion into mammalian cells (FIG. 16C).

Packaging the Integrase-dCas9 Fusion Protein into Lentiviral Particles.

[0380] Existing lentiviral delivery systems can be modified to incorporate editing components for the purpose of targeted lentiviral donor template integration for genome editing in mammalian cells (FIGS. 17-20). Described herein are three different approaches for the delivery and targeted integration of lentiviral donor sequences into mammalian genomes.

[0381] The first approach is to incorporate dCas9 directly as a fusion to Integrase (or to Integrase lacking its C-terminal non-specific DNA binding domain, INAC) within a lentiviral packaging plasmid (ex. psPax2) encoding the gag-pol polyprotein (FIG. 17A). In this approach, the modified gag-pol polyprotein is translated with other viral components as a polyprotein, loaded with guide-RNA and packaged into lentiviral particles (FIG. 4B). The Integrase-dCas9 fusion protein retains the sequences necessary for protease cleavage (PR), and thus is cleaved normally from the gag-pol polyprotein during particle maturation. Transduction of mammalian cells results in the delivery of viral proteins, including the IN-dCas9 fusion protein, sgRNA, and lentiviral donor sequence. Reverse transcription of the ssRNA genome by reverse transcriptase generates a dsDNA sequence containing correct viral end sequences (U3 and U5) which is then Integrated into mammalian genomes by the IN-dCas9 fusion protein.

[0382] A second approach is to generate N-terminal and C-terminal fusions of Integrase-dCas9 with the HIV viral protein R (VPR) (FIG. 18A). VPR is efficiently packaged as an accessory protein into lentiviral particles and has been used to package heterologous proteins (e.x. GFP) into lentiviral particles. A viral protease cleavage sequence is included between VPR and the IN-dCas9 fusion protein, so that after maturation, the IN-dCas9 is freed from VPR (FIG. 18A). Co-transfection of packaging cells with lentiviral components generates viral particles containing the VPR-IN-dCas9 protein and sgRNA. The packaging plasmid required for viral particle formation (ex. psPax2) contains a mutation within Integrase to inhibit its catalytic activity, thereby preventing non-mediated integration (FIG. 18B). Upon viral transduction, the Integrase-dCas9 protein is delivered and mediate the integration of the lentiviral donor sequences (FIG. 18C). The benefit to delivery of the IN-dCas9 fusion and sgRNA as a riboprotein is that it is only transiently expressed in the target cell.

[0383] A third method is to incorporate the Integrase-dCas9 fusion protein and sgRNA expression cassettes directly within a lentiviral transfer plasmid, or other viral vector (such as AAV) (FIG. 19A). The transfer plasmid containing the IN-dCas9 fusion protein and sgRNA is co-transfected with packaging and envelope plasmids required to generate lentiviral particles. If using a lentivirus, the packaging plasmid contains a catalytic mutation within Integrase to inhibit non-specific integration (FIG. 19B). Upon transduction of a mammalian cell, expression of the IN-dCas9 fusion protein and sgRNA generate components capable of targeting its own viral donor vector for targeted integration (self-integration) (FIG. 19C). This method is used for targeted gene disruption or as a gene drive. Alternatively, co-transduction with an additional lentiviral particle encoding a donor sequence serves as the integrated donor template (FIG. 19). Prevention of self-integration of its own viral encoding sequence in this approach is achieved by using Integrase enzymes from different retroviral family members and their corresponding transfer plasmids. For example, an HIV lentiviral particle encoding an FIV IN-dCas9 fusion protein is utilized to integrate an FIV donor template encoded within an FIV lentiviral particle (FIG. 20).

Generation of a Single Locus, Constitutively Active, Ubiquitous ROSA26 m^{GFP/+} Reporter Mouse Line

[0384] The ROSA26 mT/mG reporter mouse line (Jackson Labs, Stock #007576) contains a floxed, membrane localized tdTO (mT) fluorescent reporter cassette, which when recombined with a CRE recombinase, results in removal of a mT reporter and allows for expression of a membrane localized eGFP (mG) reporter. To generate a single locus, in vivo GFP reporter line, ROSA26 mT/mG mice were crossed with a universal CAG-CRE recombinase mouse to generate a constitutively and ubiquitously expressed ROSA26 mG reporter mouse. Isolation of mouse embryonic fibroblasts (MEFs) from heterozygous ROSA26^{mG/+} mice revealed robust membrane GFP expression in all cells in culture (FIG. 21). A similar strategy is utilized to generate a ubiquitous and constitutively active nuclear GFP reporter by recombining the ROSA26 nT/nG mouse strain (Jackson Labs, Stock #023035).

Packaging of Components into Lentiviral Particles for Targeted Integration into the ROSA-mGFP Locus.

[0385] For targeted integration of an IRES-tdTO sequence into the GFP coding sequence in ROSA26^{mG/+} MEFs, lentiviral particles were generated in a packaging cell line (Lenti-X 293T, Clontech). Lentiviral particles were generated by co-transfection of a lentiviral transfer plasmid encoding an IRES-tdTO fluorescent reporter between an 2^{nd} generation SIN lentiviral LTRs (Lenti-IRES-tdTO), an expression vector encoding a pantropic envelope protein (VSV-G), expression plasmid encoding inverted pair of GFP-targeting guide-RNAs, and a packing plasmid encoding an INΔC-dCas9 fusion in the context of the Gag-Pol lentiviral polyprotein in the psPax2 packing plasmid (INΔC-dCas9-psPax2). Lentiviral particles were harvested from supernatant, filtered using 0.45 m PES filter.

### Targeted Lentiviral Integration in Mammalian Cells

[0386] Incriptr-modified lentiviral particles were used to transduce ROSA26^{mG/+} MEFs in culture. After two days, ubiquitous red fluorescent protein expression was detectable in MEFs transduced with lentivirus encoding the IRES-tdTO reporter but retained GFP fluorescence. This initial broad expression is likely due to translation of the lentiviral IRES-tdTO encoded viral RNA and demonstrates that lentiviral packaging was not inhibited by modifications in the packaging plasmid (FIG. 21). For traditional lentiviral transduction, in the absence of viral integration, lentivirus transgene expression is not maintained. Remarkably, seven days post-transduction, tdTO red fluorescent cells were detectable in in culture, which now lacked green fluorescence in ROSA26^{mG/+} primary cells (FIG. 21) or when targeted into our previously described CMV-GFP COS-7 table cell line (FIG. 22). These data demonstrate that fusion of Integrase (lacking a C-terminal DNA binding domain) to catalytically dead Cas9 in the context of the Gag-Pol lentiviral polyprotein allows for lentiviral packaging, delivery and targeting of lentiviral encoded donor sequences in mammalian cells. Further, these data suggest that expression of guide-RNAs in lentiviral packaging cells are sufficient for incorporation into lentiviral particles, which may occur through the strong interaction with dCas9. Alternative approaches to deliver guide-RNAs into lentiviral particles may enhance targeted integration, for example, through constitutive expression of the guide-RNA(s) in the transfer plasmid, etc.

### Alternative DNA Binding Domains for Targeted Integration of Lentiviral Particles.

[0387] This data has demonstrated that replacement of the non-specific DNA binding domain of Integrase with the programmable DNA binding domain of dCas9, allows for targeted integration of dsDNA donor templates, or via delivery in lentiviral particles, for delivery of lentiviral encoded donor sequences. CRISPR-Cas systems are two-component, relying on both a Cas protein and small guide-RNA for targeting. In some instances, it may beneficial to utilize single-component DNA targeting proteins, such as TALENs, for delivery via lentiviral particles, as these are targeted solely by the encoded protein. Using a similar lentiviral production approach, replacement of dCas9 in previous packaging strategies with TALENs targeting a given sequence (for example, eGFP or a safe harbor locus), allows for lentiviral packaging and targeting without the requirement for delivery of guide-RNAs (FIG. 23). For example, TALENs are packed and delivered as a fusion to Integrase either in the context of the gag-pol polyprotein (FIG. 23A), the IN-TALEN as a fusion to a viral incorporated protein, such as VPR (FIG. 23B), or the IN-TALEN delivered within the transfer plasmid (FIG. 23C).

### Example 9: Enhanced CRISPR-Cas9 DNA Editing with the Ty1 NLS

[0388] CRISPR-Cas DNA cleavage systems are derived from bacteria and Cas proteins are both large and lack intrinsic mammalian nuclear localization signals (NLSs), preventing their efficient nuclear localization in mammalian cells.

[0389] To determine if Ty1 enhances CRISPR-Cas9 editing, CRISPR-Cas9 an existing expression plasmid (px330) was modified by replacing the C-terminal NPM NLS with the non-classical Ty1 NLS (px330-Ty1) (FIG. 24A). Next a frameshift-responsive luciferase reporter was generated, which encodes an out-of-frame luciferase coding sequence downstream of a target sequence (ts)(FIG. 24B). For this reporter assay, cleavage near the target sequence and imperfect repair by the cellular non-homologous end joining (NHEJ) pathway can induce nucleotide insertions or deletions which have the potential to re-frame the luciferase coding sequence and result in luciferase expression.

[0390] Co-expression of the Luciferase reporter with a vector encoding Cas9 containing the NPM NLS and a single guide-RNA specific to a 20 nucleotide target sequence resulted in a ˜20-fold increase in luciferase activity over background, relative to a non-targeting guide-RNA (FIG. 24C). Notably, expression of Cas9 containing the Ty1 NLS resulted in a significant (˜44%) enhancement in reporter activity in COS-7 cells, compared to Cas9 containing the NPM NLS (FIG. 24C).

### Example 10: Non-Homologous DNA Integration with Integrase-TALEN Fusion Proteins

[0391] Transcription Activator-like Effector Nucleases (TALENs) are a well-studied programmable DNA binding proteins which are constructed by the tandem assembly of individual nucleotide-targeting domains (Reyon et al., 2012). In a similar approach demonstrated for Inscriptr, TALENs can be utilized to direct retroviral integrase-mediated integration of a donor DNA template (FIG. 25). To generate TALEN-Integrase fusion proteins, mammalian expression vectors were constructed to receive TALEN targeting repeats from TALEN expression vectors previously described, to generate either IN-TALEN or TALEN-IN fusions. Each fusion protein incorporated a 3×FLAG epitope, a Ty1 NLS, and a TALEN repeat separated by a linker sequence between HIV Integrase lacking the C-terminal non-specific DNA binding domain (INAC). In some instances, IN mutations can be incorporated to alter IN activity, dimerization, interaction with cellular proteins, resistance to dimerization inhibitors or tandem copies of INAC (tdINΔC). For example, the E85G mutation can be incorporated to inhibit obligate dimer formation.

[0392] TALEN pairs targeting eGFP have been previously described and verified for targeting efficiency (Reyon et al., 2012; available from Addgene). TALEN pairs (ClaI/BamHI fragment) were subcloned to generate TALEN-IN fusion proteins directed to eGFP with spacers either of 16 bp or 28 bp in length.

[0393] Using a plasmid DNA integration assay (FIG. 26), co-transfection of TALEN-IN pairs targeting eGFP, a linear double stranded DNA donor sequence encoding a IGR-CAT resistance gene and an amilCP bacterial expression reporter were co-transfected into mammalian COS-7 cells. Two days post-transfection, edited plasmids were recovered from mammalian cells and transformed into e. coli and selected for on chloramphenicol plates. Interestingly, a TALEN pair separated by 16 bp resulted in ˜6 fold more Chloramphenicol-resistant colonies, whereas a TALEN pair separated by 28 bp was similar to untargeted integrase (FIG. 27). These data suggest that proximity of TALEN pairs is important for targeting and integration, a feature which has been previously reported for TALEN-FokI mediated dsDNA cleavage.

EXAMPLE 11
Table of Sequences

| SEQ | | |
|---|---|---|
| ID | | |
| NO | Type | Description |
| 1 | Protein | HIV IN |
| 2 | Protein | HIV INΔC |
| 3 | Protein | HIV tdINΔC |
| 4 | Protein | HIV E85G IN |
| 5 | Protein | HIV E85G INΔC |
| 6 | Protein | HIV E85F IN |
| 7 | Protein | HIV E85F INΔC |
| 8 | Protein | HIV D116N IN |
| 9 | Protein | HIV D116N INΔC |
| 10 | Protein | HIV F185K:C280S IN |
| 11 | Protein | HIV C280S IN |
| 12 | Protein | HIV F185K IN |
| 13 | Protein | HIV F185K INΔC |
| 14 | Protein | HIV T97A:Y143R IN |
| 15 | Protein | HIV T97A:Y143R INΔC |
| 16 | Protein | HIV G140S:Q148H IN |
| 17 | Protein | HIV G140S:Q148H INΔC |
| 18 | Protein | RSV IN |
| 19 | Protein | RSV INΔC |
| 20 | Protein | HFV IN |
| 21 | Protein | HFV INΔC |
| 22 | Protein | EIAV IN |
| 23 | Protein | EIAV INΔC |
| 24 | Protein | MoLV IN |
| 25 | Protein | MoLV INΔC |
| 26 | Protein | MMTV IN |
| 27 | Protein | MMTV INΔC |
| 28 | Protein | WDSV IN |
| 29 | Protein | WDSV INΔC |
| 30 | Protein | BLV IN |
| 31 | Protein | BLV INΔC |
| 32 | Protein | SIV IN |
| 33 | Protein | SIV INΔC |
| 34 | Protein | FIV IN |
| 35 | Protein | FIV INΔC |
| 36 | Protein | BIV IN |
| 37 | Protein | BIV INΔC |
| 38 | Protein | Ty1 INΔC |
| 39 | Protein | InsF IN |
| 40 | Protein | InsF INΔN |
| 41 | Protein | Cas9 |
| 42 | Protein | dCas9 |
| 43 | Protein | SaCas9 |
| 44 | Protein | dSaCas9 |
| 45 | Protein | Cpf1 |
| 46 | Protein | dCpf1 |
| 47 | Protein | 1xSV40 |
| 48 | Protein | 3xSV40 |
| 49 | Protein | 3xFLAG |
| 50 | Protein | NPM |
| 51 | Protein | Ty1 |
| 52 | Protein | 1xSV40 + 3xFLAG |
| 53 | Protein | 3xSV40 + 3xFLAG |
| 54 | Protein | NPM + 3xFLAG |
| 55 | Protein | NPM + 3xSV40 + 3xFLAG |
| 56 | Protein | Ty1 + 3xFLAG |
| 57 | Protein | HIV IN-dCas9-Ty1 |
| 58 | Protein | HIV INΔC-dCas9-Ty1 |
| 59 | Protein | HIV tdINΔC-dCas9-Ty1 |
| 60 | Protein | HIV E85G IN-dCas9-Ty1 |
| 61 | Protein | HIV E85G INΔC-dCas9-Ty1 |
| 62 | Protein | HIV E85F IN-dCas9-Ty1 |
| 63 | Protein | HIV E85F INΔC-dCas9-Ty1 |
| 64 | Protein | HIV D116N IN-dCas9-Ty1 |
| 65 | Protein | HIV D116N INΔC-dCas9-Ty1 |
| 66 | Protein | HIV F185K:C280S IN-dCas9- |
| | | Ty1 |
| 67 | Protein | HIV C280S IN-dCas9-Ty1 |
| 68 | Protein | HIV F185K IN-dCas9-Ty1 |
| 69 | Protein | HIV F185K INΔC-dCas9-Ty1 |
| 70 | Protein | HIV T97A:Y143R IN-dCas9- |
| | | Ty1 |
| 71 | Protein | HIV T97A:Y143R INΔC- |
| | | dCas9-Ty1 |
| 72 | Protein | HIV G140S:Q148H IN-dCas9- |
| | | Ty1 |
| 73 | Protein | HIV G140S:Q148H INΔC- |
| | | dCas9-Ty1 |
| 74 | Protein | RSV IN-dCas9-Ty1 |
| 75 | Protein | RSV INΔC-dCas9-Ty1 |
| 76 | Protein | HFV IN-dCas9-Ty1 |
| 77 | Protein | HFV INΔC-dCas9-Ty1 |
| 78 | Protein | EIAV IN-dCas9-Ty1 |
| 79 | Protein | EIAV INΔC-dCas9-Ty1 |
| 80 | Protein | MoLV IN-dCas9-Ty1 |
| 81 | Protein | MoLV INΔC-dCas9-Ty1 |
| 82 | Protein | MMTV IN-dCas9-Ty1 |
| 83 | Protein | MMTV INΔC-dCas9-Ty1 |
| 84 | Protein | WDSV IN-dCas9-Ty1 |
| 85 | Protein | WDSV INΔC-dCas9-Ty1 |
| 86 | Protein | BLV IN-dCas9-Ty1 |
| 87 | Protein | BLV INΔC-dCas9-Ty1 |
| 88 | Protein | SIV IN-dCas9-Ty1 |
| 89 | Protein | SIV INΔC-dCas9-Ty1 |
| 90 | Protein | FIV IN-dCas9-Ty1 |
| 91 | Protein | FIV INΔC-dCas9-Ty1 |
| 92 | Protein | BIV IN-dCas9-Ty1 |
| 93 | Protein | BV INΔC-dCas9-Ty1 |
| 94 | Protein | Ty1 INΔC-dCas9-Ty1 |
| 95 | Protein | InsF IN-dCas9-Ty1 |
| 96 | Protein | InsF INΔN-dCas9-Ty1 |
| 97 | Protein | 3xFLAG-Ty1NLS-dCas9- |
| | | linker-INdC |
| 98 | Protein | NLS-INdC(HIV)-linker- |
| | | dSaCas9-Ty1nls-3xFlag |
| 99 | Nucleic | HIV IN |
| | Acid | |
| 100 | Nucleic | HIV INΔC |
| | Acid | |
| 101 | Nucleic | HIV tdINΔC |
| | Acid | |
| 102 | Nucleic | HIV E85G IN |
| | Acid | |
| 103 | Nucleic | HIV E85G INΔC |
| | Acid | |
| 104 | Nucleic | HIV E85F IN |
| | Acid | |
| 105 | Nucleic | HIV E85F INΔC |
| | Acid | |
| 106 | Nucleic | HIV D116N IN |
| | Acid | |
| 107 | Nucleic | HIV D116N INΔC |
| | Acid | |
| 108 | Nucleic | HIV F185K:C280S IN |
| | Acid | |
| 109 | Nucleic | HIV C280S IN |
| | Acid | |
| 110 | Nucleic | HIV F185K IN |
| | Acid | |
| 111 | Nucleic | HIV F185K INΔC |
| | Acid | |
| 112 | Nucleic | HIV T97A:Y143R IN |
| | Acid | |
| 113 | Nucleic | HIV T97A:Y143R INΔC |
| | Acid | |
| 114 | Nucleic | HIV G140S:Q148H IN |
| | Acid | |
| 115 | Nucleic | HIV G140S:Q148H INΔC |
| | Acid | |
| 116 | Nucleic | RSV IN |
| | Acid | |
| 117 | Nucleic | RSV INΔC |
| | Acid | |
| 118 | Nucleic | HFV IN |
| | Acid | |
| 119 | Nucleic | HFV INΔC |
| | Acid | |
| 120 | Nucleic | EIAV IN |
| | Acid | |
| 121 | Nucleic | EIAV INΔC |
| | Acid | |
| 122 | Nucleic | MoLV IN |
| | Acid | |
| 123 | Nucleic | MoLV INΔC |
| | Acid | |
| 124 | Nucleic | MMTV IN |
| | Acid | |
| 125 | Nucleic | MMTV INΔC |
| | Acid | |
| 126 | Nucleic | WDSV IN |
| | Acid | |
| 127 | Nucleic | WDSV INΔC |
| | Acid | |
| 128 | Nucleic | BLV IN |
| | Acid | |
| 129 | Nucleic | BLV INΔC |
| | Acid | |
| 130 | Nucleic | SIV IN |
| | Acid | |
| 131 | Nucleic | SIV INΔC |
| | Acid | |
| 132 | Nucleic | FIV IN |
| | Acid | |
| 133 | Nucleic | FIV INΔC |
| | Acid | |
| 134 | Nucleic | BIV IN |
| | Acid | |
| 135 | Nucleic | BV INΔC |
| | Acid | |
| 136 | Nucleic | Ty1 INΔC |
| | Acid | |
| 137 | Nucleic | InsF IN |
| | Acid | |
| 138 | Nucleic | InsF INΔN |
| | Acid | |
| 139 | Nucleic | Cas9 |
| | Acid | |
| 140 | Nucleic | dCas9 |
| | Acid | |
| 141 | Nucleic | SaCas9 |
| | Acid | |
| 142 | Nucleic | dSaCas9 |
| | Acid | |
| 143 | Nucleic | Cpf1 |
| | Acid | |
| 144 | Nucleic | dCpf1 |
| | Acid | |
| 145 | Nucleic | 1xSV40 |
| | Acid | |
| 146 | Nucleic | 3xSV40 |
| | Acid | |
| 147 | Nucleic | 3xFLAG |
| | Acid | |
| 148 | Nucleic | NPM |
| | Acid | |
| 149 | Nucleic | Ty1 |
| | Acid | |
| 150 | Nucleic | 1xSV40 + 3xFLAG |
| | Acid | |
| 151 | Nucleic | 3xSV40 + 3xFLAG |
| | Acid | |
| 152 | Nucleic | NPM + 3xFLAG |
| | Acid | |
| 153 | Nucleic | NPM + 3xSV40 + 3xFLAG |
| | Acid | |
| 154 | Nucleic | Ty1 + 3xFLAG |
| | Acid | |
| 155 | Nucleic | HIV IN-dCas9-Ty1 |
| | Acid | |
| 156 | Nucleic | HIV INΔC-dCas9-Ty1 |
| | Acid | |
| 157 | Nucleic | HIV tdINΔC-dCas9-Ty1 |
| | Acid | |
| 158 | Nucleic | HIV E85G IN-dCas9-Ty1 |
| | Acid | |
| 159 | Nucleic | HIV E85G INΔC-dCas9-Ty1 |
| | Acid | |
| 160 | Nucleic | HIV E85F IN-dCas9-Ty1 |
| | Acid | |
| 161 | Nucleic | HIV E85F INΔC-dCas9-Ty1 |
| | Acid | |
| 162 | Nucleic | HIV D116N IN-dCas9-Ty1 |
| | Acid | |
| 163 | Nucleic | HIV D116N INΔC-dCas9-Ty1 |
| | Acid | |
| 164 | Nucleic | HIV F185K:C280S IN-dCas9- |
| | Acid | Ty1 |
| 165 | Nucleic | HIV C280S IN-dCas9-Ty1 |
| | Acid | |
| 166 | Nucleic | HIV F185K IN-dCas9-Ty1 |
| | Acid | |
| 167 | Nucleic | HIV F185K INΔC-dCas9-Ty1 |
| | Acid | |
| 168 | Nucleic | HIV T97A:Y143R IN-dCas9- |
| | Acid | Ty1 |
| 169 | Nucleic | HIV T97A:Y143R INΔC- |
| | Acid | dCas9-Ty1 |
| 170 | Nucleic | HIV G140S:Q148H IN-dCas9- |
| | Acid | Ty1 |
| 171 | Nucleic | HIV G140S:Q148H INΔC- |
| | Acid | dCas9-Ty1 |
| 172 | Nucleic | RSV IN-dCas9-Ty1 |
| | Acid | |
| 173 | Nucleic | RSV INΔC-dCas9-Ty1 |
| | Acid | |
| 174 | Nucleic | HFV IN-dCas9-Ty1 |
| | Acid | |
| 175 | Nucleic | HFV INΔC-dCas9-Ty1 |
| | Acid | |
| 176 | Nucleic | EIAV IN-dCas9-Ty1 |
| | Acid | |
| 177 | Nucleic | EIAV INΔC-dCas9-Ty1 |
| | Acid | |
| 178 | Nucleic | MoLV IN-dCas9-Ty1 |
| | Acid | |
| 179 | Nucleic | MoLV INΔC-dCas9-Ty1 |
| | Acid | |
| 180 | Nucleic | MMTV IN-dCas9-Ty1 |
| | Acid | |
| 181 | Nucleic | MMTV INΔC-dCas9-Ty1 |
| | Acid | |
| 182 | Nucleic | WDSV IN-dCas9-Ty1 |
| | Acid | |
| 183 | Nucleic | WDSV INΔC-dCas9-Ty1 |
| | Acid | |
| 184 | Nucleic | BLV IN-dCas9-Ty1 |
| | Acid | |
| 185 | Nucleic | BLV INΔC-dCas9-Ty1 |
| | Acid | |
| 186 | Nucleic | SIV IN-dCas9-Ty1 |
| | Acid | |
| 187 | Nucleic | SIV INΔC-dCas9-Ty1 |
| | Acid | |
| 188 | Nucleic | FIV IN-dCas9-Ty1 |
| | Acid | |
| 189 | Nucleic | FIV INΔC-dCas9-Ty1 |
| | Acid | |
| 190 | Nucleic | BIV IN-dCas9-Ty1 |
| | Acid | |
| 191 | Nucleic | BV INΔC-dCas9-Ty1 |
| | Acid | |
| 192 | Nucleic | Ty1 INΔC-dCas9-Ty1 |
| | Acid | |
| 193 | Nucleic | InsF IN-dCas9-Ty1 |
| | Acid | |
| 194 | Nucleic | InsF INΔN-dCas9-Ty1 |
| | Acid | |
| 195 | Nucleic | 3xFLAG-Ty1NLS-dCas9- |
| | Acid | linker-INdC |
| 196 | Nucleic | NLS-INdC(HIV)-linker- |
| | Acid | dSaCas9-Ty1nls-3xFlag |
| 197 | Nucleic | HIV U3 |
| | Acid | |
| 198 | Nucleic | HIV U5 |
| | Acid | |
| 199 | Nucleic | RSV U3 |
| | Acid | |
| 200 | Nucleic | RSV U5 |
| | Acid | |
| 201 | Nucleic | HFV U3 |
| | Acid | |
| 202 | Nucleic | HFV U5 |
| | Acid | |
| 203 | Nucleic | EIAV U3 |
| | Acid | |
| 204 | Nucleic | EIAV U5 |
| | Acid | |
| 205 | Nucleic | MoLV U3 |
| | Acid | |
| 206 | Nucleic | MoLV U5 |
| | Acid | |
| 207 | Nucleic | MMTV U3 |
| | Acid | |
| 208 | Nucleic | MMTV U5 |
| | Acid | |
| 209 | Nucleic | WDSV U3 |
| | Acid | |
| 210 | Nucleic | WDSV U5 |
| | Acid | |
| 211 | Nucleic | BLV U3 |
| | Acid | |
| 212 | Nucleic | BLV U5 |
| | Acid | |
| 213 | Nucleic | SIV U3 |
| | Acid | |
| 214 | Nucleic | SIV U5 |
| | Acid | |
| 215 | Nucleic | FIV U3 |
| | Acid | |
| 216 | Nucleic | FIV U5 |
| | Acid | |
| 217 | Nucleic | BIV U3 |
| | Acid | |
| 218 | Nucleic | BIV U5 |
| | Acid | |
| 219 | Nucleic | TY1 U3 |
| | Acid | |
| 220 | Nucleic | TY1 U5 |
| | Acid | |
| 221 | Nucleic | InsF IS3 IRL |
| | Acid | |
| 222 | Nucleic | InsF IS3 IRR |
| | Acid | |
| 223 | Nucleic | INsrt HIV empty vector |
| | Acid | |
| 224 | Nucleic | INsrt RSV empty vector |
| | Acid | |
| 225 | Nucleic | INsrt MoLV empty vector: |
| | Acid | |
| 226 | Nucleic | INsrt MMTV empty vector |
| | Acid | |
| 227 | Nucleic | INsrt BLV empty vector |
| | Acid | |
| 228 | Nucleic | INsrt WDSV empty vector |
| | Acid | |
| 229 | Nucleic | INsrt EIAV empty vector |
| | Acid | |
| 230 | Nucleic | INsrt SIV empty vector |
| | Acid | |
| 231 | Nucleic | INsrt FIV empty vector |
| | Acid | |
| 232 | Nucleic | INsrt BIV empty vector |
| | Acid | |
| 233 | Nucleic | INsrt HFV empty vector |
| | Acid | |
| 234 | Nucleic | INsrt Ty1 empty vector |
| | Acid | |
| 235 | Nucleic | INsrt IS3 empty vector (for |
| | Acid | InsF) |
| 236 | Nucleic | INsrt(HIV)-IG3-CmR |
| | Acid | |
| 237 | Nucleic | INsrt(HIV)-IG3-mCherry-2a- |
| | Acid | Puro-pA |
| 238 | Nucleic | amilCP ORF target sequence |
| | Acid | |
| 239 | Nucleic | amilCP open reading frame in |
| | Acid | pCRII backbone |
| 240 | Nucleic | eGFP ORF target sequence |
| | Acid | |
| 241 | Nucleic | eGFP ORF target sequence |
| | Acid | |
| 242 | Nucleic | eEF1a1 3’UTR target |
| | Acid | sequence |
| 243 | Nucleic | amilCP target A |
| | Acid | |
| 244 | Nucleic | amilCP target B |
| | Acid | |
| 245 | Nucleic | GFP target A |
| | Acid | |
| 246 | Nucleic | GFP target B |
| | Acid | |
| 247 | Nucleic | eEF1A1 3’UTR target A |
| | Acid | |
| 248 | Nucleic | eEF1A1 3’UTR target B |
| | Acid | |
| 249 | Protein | CRISPR-Ty1 Fusion: |
| | | 3XFLAG-SV40 NLS-Cas9- |
| | | NPM NLS |
| 250 | Protein | CRISPR-Ty1 Fusion: |
| | | 3XFLAG-SV40 NLS-Cas9- |
| | | Ty1 NLS |
| 251 | Protein | VPR-INDC-dCas9 |
| 252 | Protein | INDC-dCas9-VPR |
| 253 | Protein | VPR |
| 254 | Protein | TY2 |
| 255 | Protein | INO4 |
| 256 | Protein | MAK11 |
| 257 | Protein | STH1 |
| 258 | Nucleic | CRISPR-Ty1 Fusion: 3XFLAG- |
| | Acid | SV40 NLS-Cas9-NPM NLS |
| 259 | Nucleic | CRISPR-Ty1 Fusion: 3XFLAG- |
| | Acid | SV40 NLS-Cas9-Ty1 NLS |
| 260 | Nucleic | VPR-INDC-dCas9 |
| | Acid | |
| 261 | Nucleic | INDC-dCas9-VPR |
| | Acid | |
| 262 | Nucleic | VPR |
| | Acid | |
| 263 | Nucleic | ts-2a-Lucifease |
| | Acid | |
| 264 | Nucleic | Lenti-IRES-tdTO |
| | Acid | |
| 265 | Nucleic | INDC-dCas9-psPax2 |
| | Acid | |
| 266 | Nucleic | dCas9-INDC-psPax2 |
| | Acid | |
| 267 | Nucleic | INDC-TALEN(GFP-L)-psPax2 |
| | Acid | |
| 268 | Nucleic | INDC-TALEN(GFP-R)-psPax2 |
| | Acid | |
| 269 | Nucleic | TALEN(GFP-R)-INDC-psPax2 |
| | Acid | |
| 270 | Nucleic | TALEN(GFP-L)-INDC-psPax2 |
| | Acid | |
| 271 | Nucleic | Guide-RNA target sequence IN- |
| | Acid | TALEN GFP-L |
| 272 | Nucleic | Guide-RNA target sequenc IN- |
| | Acid | TALEN GFP-R |
| 273 | Nucleic | Guide-RNA target sequence |
| | Acid | INdC-TALEN GFP-L |
| 274 | Nucleic | Guide-RNA target sequenc |
| | Acid | INdC-TALEN GFP-R |
| 275 | Protein | Ty1-like NLS O28090-0 |
| 276 | Protein | Ty1-like NLS O50087-0 |
| 277 | Protein | Ty1-like NLS O58353-0 |
| 278 | Protein | Ty1-like NLS Q57602-0 |
| 279 | Protein | Ty1-like NLS Q6L1X9-0 |
| 280 | Protein | Ty1-like NLS A0K3M1-0 |
| 281 | Protein | Ty1-like NLS A0LYZ1-0 |
| 282 | Protein | Ty1-like NLS A1B022-0 |
| 283 | Protein | Ty1-like NLS A1V8A7-0 |
| 284 | Protein | Ty1-like NLS A1VIP6-0 |
| 285 | Protein | Ty1-like NLS A2RDW6-0 |
| 286 | Protein | Ty1-like NLS A2S7H2-0 |
| 287 | Protein | Ty1-like NLS A3MRV0-0 |
| 288 | Protein | Ty1-like NLS A3NEI3-0 |
| 289 | Protein | Ty1-like NLS A3P0B7-0 |
| 290 | Protein | Ty1-like NLS A4JAN6-0 |
| 291 | Protein | Ty1-like NLS A4SUV7-0 |
| 292 | Protein | Ty1-like NLS A5FP03-0 |
| 293 | Protein | Ty1-like NLS A5ILZ2-0 |
| 294 | Protein | Ty1-like NLS A6GY20-0 |
| 295 | Protein | Ty1-like NLS A6LLI5-0 |
| 296 | Protein | Ty1-like NLS A6LQX4-0 |
| 297 | Protein | Ty1-like NLS A8F6X2-0 |
| 298 | Protein | Ty1-like NLS A8G6B7-0 |
| 299 | Protein | Ty1-like NLS A9ADI9-0 |
| 300 | Protein | Ty1-like NLS A9IJ08-0 |
| 301 | Protein | Ty1-like NLS A9IXA1-0 |
| 302 | Protein | Ty1-like NLS A9NEN2-0 |
| 303 | Protein | Ty1-like NLS B0S140-0 |
| 304 | Protein | Ty1-like NLS B1JU18-0 |
| 305 | Protein | Ty1-like NLS B1LBA1-0 |
| 306 | Protein | Ty1-like NLS B1W354-0 |
| 307 | Protein | Ty1-like NLS B1XSP7-0 |
| 308 | Protein | Ty1-like NLS B1YRC6-0 |
| 309 | Protein | Ty1-like NLS B2JIH0-0 |
| 310 | Protein | Ty1-like NLS B2T755-0 |
| 311 | Protein | Ty1-like NLS B2UEM3-0 |
| 312 | Protein | Ty1-like NLS B3PLU0-0 |
| 313 | Protein | Ty1-like NLS B3R7T2-0 |
| 314 | Protein | Ty1-like NLS B4E5B6-0 |
| 315 | Protein | Ty1-like NLS B4S3C9-0 |
| 316 | Protein | Ty1-like NLS B7IHT4-0 |
| 317 | Protein | Ty1-like NLS B8E0X6-0 |
| 318 | Protein | Ty1-like NLS B9K7W0-0 |
| 319 | Protein | Ty1-like NLS C1A494-0 |
| 320 | Protein | Ty1-like NLS C5CE41-0 |
| 321 | Protein | Ty1-like NLS O88058-0 |
| 322 | Protein | Ty1-like NLS P0DG92-0 |
| 323 | Protein | Ty1-like NLS P0DG93-0 |
| 324 | Protein | Ty1-like NLS P60554-0 |
| 325 | Protein | Ty1-like NLS P67354-0 |
| 326 | Protein | Ty1-like NLS P75311-0 |
| 327 | Protein | Ty1-like NLS P75471-0 |
| 328 | Protein | Ty1-like NLS P94372-0 |
| 329 | Protein | Ty1-like NLS Q056Y0-0 |
| 330 | Protein | Ty1-like NLS Q057D7-0 |
| 331 | Protein | Ty1-like NLS Q0AYB7-0 |
| 332 | Protein | Ty1-like NLS Q0BJ50-0 |
| 333 | Protein | Ty1-like NLS Q0K610-0 |
| 334 | Protein | Ty1-like NLS Q0STA4-0 |
| 335 | Protein | Ty1-like NLS Q0STL9-0 |
| 336 | Protein | Ty1-like NLS Q0TQV7-0 |
| 337 | Protein | Ty1-like NLS Q0TR88-0 |
| 338 | Protein | Ty1-like NLS Q12GX5-0 |
| 339 | Protein | Ty1-like NLS Q13TG6-0 |
| 340 | Protein | Ty1-like NLS Q1AWG1-0 |
| 341 | Protein | Ty1-like NLS Q1BRU4-0 |
| 342 | Protein | Ty1-like NLS Q1J5X5-0 |
| 343 | Protein | Ty1-like NLS Q1JAY8-0 |
| 344 | Protein | Ty1-like NLS Q1JG57-0 |
| 345 | Protein | Ty1-like NLS Q1JL34-0 |
| 346 | Protein | Ty1-like NLS Q1LI28-0 |
| 347 | Protein | Ty1-like NLS Q2L2H3-0 |
| 348 | Protein | Ty1-like NLS Q2NIH1-0 |
| 349 | Protein | Ty1-like NLS Q2SU23-0 |
| 350 | Protein | Ty1-like NLS Q39KH1-0 |
| 351 | Protein | Ty1-like NLS Q3JMQ8-0 |
| 352 | Protein | Ty1-like NLS Q3YRL8-0 |
| 353 | Protein | Ty1-like NLS Q46WD9-0 |
| 354 | Protein | Ty1-like NLS Q48SQ4-0 |
| 355 | Protein | Ty1-like NLS Q49418-0 |
| 356 | Protein | Ty1-like NLS Q56307-0 |
| 357 | Protein | Ty1-like NLS Q5LEQ4-0 |
| 358 | Protein | Ty1-like NLS Q5WEJ7-0 |
| 359 | Protein | Ty1-like NLS Q5XBA0-0 |
| 360 | Protein | Ty1-like NLS Q62GK1-0 |
| 361 | Protein | Ty1-like NLS Q63Q07-0 |
| 362 | Protein | Ty1-like NLS Q64VP0-0 |
| 363 | Protein | Ty1-like NLS Q6G3V1-0 |
| 364 | Protein | Ty1-like NLS Q6G5M0-0 |
| 365 | Protein | Ty1-like NLS Q6LLQ8-0 |
| 366 | Protein | Ty1-like NLS Q6MDC1-0 |
| 367 | Protein | Ty1-like NLS Q6MDH4-0 |
| 368 | Protein | Ty1-like NLS Q6ME08-0 |
| 369 | Protein | Ty1-like NLS Q73PH4-0 |
| 370 | Protein | Ty1-like NLS Q7MAD1-0 |
| 371 | Protein | Ty1-like NLS Q7UP72-0 |
| 372 | Protein | Ty1-like NLS Q7VTD6-0 |
| 373 | Protein | Ty1-like NLS Q7W2F9-0 |
| 374 | Protein | Ty1-like NLS Q7WRC8-0 |
| 375 | Protein | Ty1-like NLS Q828D0-0 |
| 376 | Protein | Ty1-like NLS Q895M9-0 |
| 377 | Protein | Ty1-like NLS Q8AAP0-0 |
| 378 | Protein | Ty1-like NLS Q8D1X2-0 |
| 379 | Protein | Ty1-like NLS Q8K908-0 |
| 380 | Protein | Ty1-like NLS Q8P0C9-0 |
| 381 | Protein | Ty1-like NLS Q8XKR1-0 |
| 382 | Protein | Ty1-like NLS Q8XL46-0 |
| 383 | Protein | Ty1-like NLS Q8XV09-0 |
| 384 | Protein | Ty1-like NLS Q93Q47-0 |
| 385 | Protein | Ty1-like NLS Q9L0Q6-0 |
| 386 | Protein | Ty1-like NLS Q9L0Q6-1 |
| 387 | Protein | Ty1-like NLS Q9L0Q6-2 |
| 388 | Protein | Ty1-like NLS Q9L0Q6-3 |
| 389 | Protein | Ty1-like NLS Q9L0Q6-4 |
| 390 | Protein | Ty1-like NLS Q9L0Q6-5 |
| 391 | Protein | Ty1-like NLS Q9L0Q6-6 |
| 392 | Protein | Ty1-like NLS Q9X1S8-0 |
| 393 | Protein | Ty1-like NLS A1CNV8-0 |
| 394 | Protein | Ty1-like NLS A1D1R8-0 |
| 395 | Protein | Ty1-like NLS A1D731-0 |
| 396 | Protein | Ty1-like NLS A2QAX7-0 |
| 397 | Protein | Ty1-like NLS A3LQ55-0 |
| 398 | Protein | Ty1-like NLS A5DGY0-0 |
| 399 | Protein | Ty1-like NLS A5DKW3-0 |
| 400 | Protein | Ty1-like NLS A5DLG8-0 |
| 401 | Protein | Ty1-like NLS A5DY34-0 |
| 402 | Protein | Ty1-like NLS A6RBB0-0 |
| 403 | Protein | Ty1-like NLS A6RMZ2-0 |
| 404 | Protein | Ty1-like NLS A6ZL85-0 |
| 405 | Protein | Ty1-like NLS A6ZZJ1-0 |
| 406 | Protein | Ty1-like NLS A7E4K0-0 |
| 407 | Protein | Ty1-like NLS G0S8I1-0 |
| 408 | Protein | Ty1-like NLS O13527-0 |
| 409 | Protein | Ty1-like NLS O13535-0 |
| 410 | Protein | Ty1-like NLS O13658-0 |
| 411 | Protein | Ty1-like NLS O14064-0 |
| 412 | Protein | Ty1-like NLS O14076-0 |
| 413 | Protein | Ty1-like NLS O42668-0 |
| 414 | Protein | Ty1-like NLS O43068-0 |
| 415 | Protein | Ty1-like NLS O74777-0 |
| 416 | Protein | Ty1-like NLS O74862-0 |
| 417 | Protein | Ty1-like NLS O94383-0 |
| 418 | Protein | Ty1-like NLS O94487-0 |
| 419 | Protein | Ty1-like NLS O94585-0 |
| 420 | Protein | Ty1-like NLS O94652-0 |
| 421 | Protein | Ty1-like NLS P0C2I2-0 |
| 422 | Protein | Ty1-like NLS P0C2I3-0 |
| 423 | Protein | Ty1-like NLS P0C2I5-0 |
| 424 | Protein | Ty1-like NLS P0C2I6-0 |
| 425 | Protein | Ty1-like NLS P0C2I7-0 |
| 426 | Protein | Ty1-like NLS P0C2I9-0 |
| 427 | Protein | Ty1-like NLS P0C2J0-0 |
| 428 | Protein | Ty1-like NLS P0C2J1-0 |
| 429 | Protein | Ty1-like NLS P0C2J3-0 |
| 430 | Protein | Ty1-like NLS P0C2J5-0 |
| 431 | Protein | Ty1-like NLS P0CM98-0 |
| 432 | Protein | Ty1-like NLS P0CM99-0 |
| 433 | Protein | Ty1-like NLS P0CX63-0 |
| 434 | Protein | Ty1-like NLS P0CX64-0 |
| 435 | Protein | Ty1-like NLS P13902-0 |
| 436 | Protein | Ty1-like NLS P14746-0 |
| 437 | Protein | Ty1-like NLS P20484-0 |
| 438 | Protein | Ty1-like NLS P22936-0 |
| 439 | Protein | Ty1-like NLS P25384-0 |
| 440 | Protein | Ty1-like NLS P32597-0 |
| 441 | Protein | Ty1-like NLS P36006-0 |
| 442 | Protein | Ty1-like NLS P36080-0 |
| 443 | Protein | Ty1-like NLS P38112-0 |
| 444 | Protein | Ty1-like NLS P47098-0 |
| 445 | Protein | Ty1-like NLS P47100-0 |
| 446 | Protein | Ty1-like NLS P51599-0 |
| 447 | Protein | Ty1-like NLS P53119-0 |
| 448 | Protein | Ty1-like NLS |
| | | P53123-0 |
| 449 | Protein | Ty1-like NLS |
| | | P53125-0 |
| 450 | Protein | Ty1-like NLS |
| | | Q01301-0 |
| 451 | Protein | Ty1-like NLS |
| | | Q03434-0 |
| 452 | Protein | Ty1-like NLS |
| | | Q03494-0 |
| 453 | Protein | Ty1-like NLS |
| | | Q03612-0 |
| 454 | Protein | Ty1-like NLS |
| | | Q03619-0 |
| 455 | Protein | Ty1-like NLS |
| | | Q03707-0 |
| 456 | Protein | Ty1-like NLS |
| | | Q03855-0 |
| 457 | Protein | Ty1-like NLS |
| | | Q04214-0 |
| 458 | Protein | Ty1-like NLS |
| | | Q04500-0 |
| 459 | Protein | Ty1-like NLS |
| | | Q04670-0 |
| 460 | Protein | Ty1-like NLS |
| | | Q04711-0 |
| 461 | Protein | Ty1-like NLS |
| | | Q06132-0 |
| 462 | Protein | Ty1-like NLS |
| | | Q07163-0 |
| 463 | Protein | Ty1-like NLS |
| | | Q07509-0 |
| 464 | Protein | Ty1-like NLS |
| | | Q07791-0 |
| 465 | Protein | Ty1-like NLS |
| | | Q07793-0 |
| 466 | Protein | Ty1-like NLS |
| | | Q09094-0 |
| 467 | Protein | Ty1-like NLS |
| | | Q09180-0 |
| 468 | Protein | Ty1-like NLS |
| | | Q09180-1 |
| 469 | Protein | Ty1-like NLS |
| | | Q09180-2 |
| 470 | Protein | Ty1-like NLS |
| | | Q09863-0 |
| 471 | Protein | Ty1-like NLS |
| | | Q0U8V9-0 |
| 472 | Protein | Ty1-like NLS |
| | | Q12088-0 |
| 473 | Protein | Ty1-like NLS |
| | | Q12112-0 |
| 474 | Protein | Ty1-like NLS |
| | | Q12113-0 |
| 475 | Protein | Ty1-like NLS |
| | | Q12141-0 |
| 476 | Protein | Ty1-like NLS |
| | | Q12193-0 |
| 477 | Protein | Ty1-like NLS |
| | | Q12269-0 |
| 478 | Protein | Ty1-like NLS |
| | | Q12273-0 |
| 479 | Protein | Ty1-like NLS |
| | | Q12316-0 |
| 480 | Protein | Ty1-like NLS |
| | | Q12337-0 |
| 481 | Protein | Ty1-like NLS |
| | | Q12339-0 |
| 482 | Protein | Ty1-like NLS |
| | | Q12414-0 |
| 483 | Protein | Ty1-like NLS |
| | | Q12472-0 |
| 484 | Protein | Ty1-like NLS |
| | | Q12490-0 |
| 485 | Protein | Ty1-like NLS |
| | | Q12491-0 |
| 486 | Protein | Ty1-like NLS |
| | | Q12501-0 |
| 487 | Protein | Ty1-like NLS |
| | | Q1DNW5-0 |
| 488 | Protein | Ty1-like NLS |
| | | Q1EA54-0 |
| 489 | Protein | Ty1-like NLS |
| | | Q2HFA6-0 |
| 490 | Protein | Ty1-like NLS |
| | | Q2HFA6-1 |
| 491 | Protein | Ty1-like NLS |
| | | Q2UQI6-0 |
| 492 | Protein | Ty1-like NLS |
| | | Q4HZ42-0 |
| 493 | Protein | Ty1-like NLS |
| | | Q4P6I3-0 |
| 494 | Protein | Ty1-like NLS |
| | | Q4WHF8-0 |
| 495 | Protein | Ty1-like NLS |
| | | Q4WRV2-0 |
| 496 | Protein | Ty1-like NLS |
| | | Q4WXQ7-0 |
| 497 | Protein | Ty1-like NLS |
| | | Q5A2K0-0 |
| 498 | Protein | Ty1-like NLS |
| | | Q5A310-0 |
| 499 | Protein | Ty1-like NLS |
| | | Q5ACW8-0 |
| 500 | Protein | Ty1-like NLS |
| | | Q5B6K3-0 |
| 501 | Protein | Ty1-like NLS |
| | | Q6BXL7-0 |
| 502 | Protein | Ty1-like NLS |
| | | Q6C1L3-0 |
| 503 | Protein | Ty1-like NLS |
| | | Q6C233-0 |
| 504 | Protein | Ty1-like NLS |
| | | Q6C2J1-0 |
| 505 | Protein | Ty1-like NLS |
| | | Q6C7C0-0 |
| 506 | Protein | Ty1-like NLS |
| | | Q6CJY0-0 |
| 507 | Protein | Ty1-like NLS |
| | | Q6CJY0-1 |
| 508 | Protein | Ty1-like NLS |
| | | Q6FML5-0 |
| 509 | Protein | Ty1-like NLS |
| | | Q75F02-0 |
| 510 | Protein | Ty1-like NLS |
| | | Q7S2A9-0 |
| 511 | Protein | Ty1-like NLS |
| | | Q7S9J4-0 |
| 512 | Protein | Ty1-like NLS |
| | | Q7SFJ3-0 |
| 513 | Protein | Ty1-like NLS |
| | | Q875K1-0 |
| 514 | Protein | Ty1-like NLS |
| | | Q8SUT1-0 |
| 515 | Protein | Ty1-like NLS |
| | | Q8SVI7-0 |
| 516 | Protein | Ty1-like NLS |
| | | Q8SVI7-1 |
| 517 | Protein | Ty1-like NLS |
| | | Q92393-0 |
| 518 | Protein | Ty1-like NLS |
| | | Q99109-0 |
| 519 | Protein | Ty1-like NLS |
| | | Q99231-0 |
| 520 | Protein | Ty1-like NLS |
| | | Q99337-0 |
| 521 | Protein | Ty1-like NLS |
| | | Q9USK2-0 |
| 522 | Protein | Ty1-like NLS |
| | | Q9UTQ5-0 |
| 523 | Protein | Ty1-like NLS |
| | | A7MD48-0 |
| 524 | Protein | Ty1-like NLS |
| | | O15446-0 |
| 525 | Protein | Ty1-like NLS |
| | | O15446-1 |
| 526 | Protein | Ty1-like NLS |
| | | O15446-2 |
| 527 | Protein | Ty1-like NLS |
| | | O43148-0 |
| 528 | Protein | Ty1-like NLS |
| | | O60271-0 |
| 529 | Protein | Ty1-like NLS |
| | | O75128-0 |
| 530 | Protein | Ty1-like NLS |
| | | O75400-0 |
| 531 | Protein | Ty1-like NLS |
| | | O75691-0 |
| 532 | Protein | Ty1-like NLS |
| | | O75937-0 |
| 533 | Protein | Ty1-like NLS |
| | | O76021-0 |
| 534 | Protein | Ty1-like NLS |
| | | O94964-0 |
| 535 | Protein | Ty1-like NLS |
| | | P23497-0 |
| 536 | Protein | Ty1-like NLS |
| | | P30414-0 |
| 537 | Protein | Ty1-like NLS |
| | | P42081-0 |
| 538 | Protein | Ty1-like NLS |
| | | P46100-0 |
| 539 | Protein | Ty1-like NLS |
| | | P51608-0 |
| 540 | Protein | Ty1-like NLS |
| | | P59797-0 |
| 541 | Protein | Ty1-like NLS |
| | | P82979-0 |
| 542 | Protein | Ty1-like NLS |
| | | Q12830-0 |
| 543 | Protein | Ty1-like NLS |
| | | Q13409-0 |
| 544 | Protein | Ty1-like NLS |
| | | Q13427-0 |
| 545 | Protein | Ty1-like NLS |
| | | Q15361-0 |
| 546 | Protein | Ty1-like NLS |
| | | Q15361-1 |
| 547 | Protein | Ty1-like NLS |
| | | Q53SF7-0 |
| 548 | Protein | Ty1-like NLS |
| | | Q5M9Q1-0 |
| 549 | Protein | Ty1-like NLS |
| | | Q5T3I0-0 |
| 550 | Protein | Ty1-like NLS |
| | | Q5T3I0-1 |
| 551 | Protein | Ty1-like NLS |
| | | Q68D10-0 |
| 552 | Protein | Ty1-like NLS |
| | | Q6IPR3-0 |
| 553 | Protein | Ty1-like NLS |
| | | Q6PD62-0 |
| 554 | Protein | Ty1-like NLS |
| | | Q6PD62-1 |
| 555 | Protein | Ty1-like NLS |
| | | Q6PD62-2 |
| 556 | Protein | Ty1-like NLS |
| | | Q6S8J7-0 |
| 557 | Protein | Ty1-like NLS |
| | | Q6ZU65-0 |
| 558 | Protein | Ty1-like NLS |
| | | Q7Z7B0-0 |
| 559 | Protein | Ty1-like NLS |
| | | Q8N9E0-0 |
| 560 | Protein | Ty1-like NLS |
| | | Q8NCU4-0 |
| 561 | Protein | Ty1-like NLS |
| | | Q8NFU7-0 |
| 562 | Protein | Ty1-like NLS |
| | | Q96DY2-0 |
| 563 | Protein | Ty1-like NLS |
| | | Q96GD3-0 |
| 564 | Protein | Ty1-like NLS |
| | | Q96P65-0 |
| 565 | Protein | Ty1-like NLS |
| | | Q96QC0-0 |
| 566 | Protein | Ty1-like NLS |
| | | Q9BQG0-0 |
| 567 | Protein | Ty1-like NLS |
| | | Q9BQG0-1 |
| 568 | Protein | Ty1-like NLS |
| | | Q9BRU9-0 |
| 569 | Protein | Ty1-like NLS |
| | | Q9H0S4-0 |
| 570 | Protein | Ty1-like NLS |
| | | Q9H6F5-0 |
| 571 | Protein | Ty1-like NLS |
| | | Q9HCK1-0 |
| 572 | Protein | Ty1-like NLS |
| | | Q9HCK8-0 |
| 573 | Protein | Ty1-like NLS |
| | | Q9NPI1-0 |
| 574 | Protein | Ty1-like NLS |
| | | Q9NSV4-0 |
| 575 | Protein | Ty1-like NLS |
| | | Q9NUL3-0 |
| 576 | Protein | Ty1-like NLS |
| | | Q9NWT1-0 |
| 577 | Protein | Ty1-like NLS |
| | | Q9NX58-0 |
| 578 | Protein | Ty1-like NLS |
| | | Q9UGU5-0 |
| 579 | Protein | Ty1-like NLS |
| | | Q9UNS1-0 |
| 580 | Protein | Ty1-like NLS |
| | | Q9Y2X3-0 |
| 581 | Protein | Ty1-like NLS |
| | | Q9Y6X0-0 |
| 582 | Protein | Ty1-like NLS |
| | | A0A1I8M2I8-0 |
| 583 | Protein | Ty1-like NLS |
| | | A1XDC0-0 |
| 584 | Protein | Ty1-like NLS |
| | | A7S6A5-0 |
| 585 | Protein | Ty1-like NLS |
| | | A8XI07-0 |
| 586 | Protein | Ty1-like NLS |
| | | A8XI07-1 |
| 587 | Protein | Ty1-like NLS |
| | | C0HKU9-0 |
| 588 | Protein | Ty1-like NLS |
| | | C6KTD2-0 |
| 589 | Protein | Ty1-like NLS |
| | | O16140-0 |
| 590 | Protein | Ty1-like NLS |
| | | O17828-0 |
| 591 | Protein | Ty1-like NLS |
| | | O17966-0 |
| 592 | Protein | Ty1-like NLS |
| | | O44410-0 |
| 593 | Protein | Ty1-like NLS |
| | | O44410-1 |
| 594 | Protein | Ty1-like NLS |
| | | O45244-0 |
| 595 | Protein | Ty1-like NLS |
| | | P0DP78-0 |
| 596 | Protein | Ty1-like NLS |
| | | P0DP78-1 |
| 597 | Protein | Ty1-like NLS |
| | | P0DP79-0 |
| 598 | Protein | Ty1-like NLS |
| | | P0DP79-1 |
| 599 | Protein | Ty1-like NLS |
| | | P0DP80-0 |
| 600 | Protein | Ty1-like NLS |
| | | P0DP80-1 |
| 601 | Protein | Ty1-like NLS |
| | | P0DP81-0 |
| 602 | Protein | Ty1-like NLS |
| | | P0DP81-1 |
| 603 | Protein | Ty1-like NLS |
| | | P14196-0 |
| 604 | Protein | Ty1-like NLS |
| | | P22058-0 |
| 605 | Protein | Ty1-like NLS |
| | | P26023-0 |
| 606 | Protein | Ty1-like NLS |
| | | P26991-0 |
| 607 | Protein | Ty1-like NLS |
| | | P35978-0 |
| 608 | Protein | Ty1-like NLS |
| | | P46758-0 |
| 609 | Protein | Ty1-like NLS |
| | | P46758-1 |
| 610 | Protein | Ty1-like NLS |
| | | P46867-0 |
| 611 | Protein | Ty1-like NLS |
| | | P54644-0 |
| 612 | Protein | Ty1-like NLS |
| | | P54812-0 |
| 613 | Protein | Ty1-like NLS |
| | | P83212-0 |
| 614 | Protein | Ty1-like NLS |
| | | Q04621-0 |
| 615 | Protein | Ty1-like NLS |
| | | Q08696-0 |
| 616 | Protein | Ty1-like NLS |
| | | Q08696-1 |
| 617 | Protein | Ty1-like NLS |
| | | Q08696-2 |
| 618 | Protein | Ty1-like NLS |
| | | Q08696-3 |
| 619 | Protein | Ty1-like NLS |
| | | Q08696-4 |
| 620 | Protein | Ty1-like NLS |
| | | Q08696-5 |
| 621 | Protein | Ty1-like NLS |
| | | Q08696-6 |
| 622 | Protein | Ty1-like NLS |
| | | Q09223-0 |
| 623 | Protein | Ty1-like NLS |
| | | Q09595-0 |
| 624 | Protein | Ty1-like NLS |
| | | Q1ELU8-0 |
| 625 | Protein | Ty1-like NLS |
| | | Q23120-0 |
| 626 | Protein | Ty1-like NLS |
| | | Q23272-0 |
| 627 | Protein | Ty1-like NLS |
| | | Q24537-0 |
| 628 | Protein | Ty1-like NLS |
| | | Q27450-0 |
| 629 | Protein | Ty1-like NLS |
| | | Q29DY1-0 |
| 630 | Protein | Ty1-like NLS |
| | | Q4N4T9-0 |
| 631 | Protein | Ty1-like NLS |
| | | Q54QQ2-0 |
| 632 | Protein | Ty1-like NLS |
| | | Q54QQ2-1 |
| 633 | Protein | Ty1-like NLS |
| | | Q54S20-0 |
| 634 | Protein | Ty1-like NLS |
| | | Q54US6-0 |
| 635 | Protein | Ty1-like NLS |
| | | Q54VU4-0 |
| 636 | Protein | Ty1-like NLS |
| | | Q54XP6-0 |
| 637 | Protein | Ty1-like NLS |
| | | Q551H0-0 |
| 638 | Protein | Ty1-like NLS |
| | | Q557G1-0 |
| 639 | Protein | Ty1-like NLS |
| | | Q55CE0-0 |
| 640 | Protein | Ty1-like NLS |
| | | Q61R02-0 |
| 641 | Protein | Ty1-like NLS |
| | | Q75JP5-0 |
| 642 | Protein | Ty 1-like NLS |
| | | Q8I5P7-0 |
| 643 | Protein | Ty1-like NLS |
| | | Q8I5P7-1 |
| 644 | Protein | Ty1-like NLS |
| | | Q8IBP1-0 |
| 645 | Protein | Ty1-like NLS |
| | | Q8ILR9-0 |
| 646 | Protein | Ty1-like NLS |
| | | Q93591-0 |
| 647 | Protein | Ty1-like NLS |
| | | Q95Y36-0 |
| 648 | Protein | Ty1-like NLS |
| | | Q9NBL2-0 |
| 649 | Protein | Ty1-like NLS |
| | | Q9NDE8-0 |
| 650 | Protein | Ty1-like NLS |
| | | Q9NDE8-1 |
| 651 | Protein | Ty1-like NLS |
| | | Q9NDE8-2 |
| 652 | Protein | Ty1-like NLS |
| | | Q9V5P6-0 |
| 653 | Protein | Ty1-like NLS |
| | | Q9VD S6-0 |
| 654 | Protein | Ty1-like NLS |
| | | Q9VGW1-0 |
| 655 | Protein | Ty1-like NLS |
| | | Q9VH89-0 |
| 656 | Protein | Ty1-like NLS |
| | | Q9VKM6-0 |
| 657 | Protein | Ty1-like NLS |
| | | Q9VNH1-0 |
| 658 | Protein | Ty1-like NLS |
| | | Q9W261-0 |
| 659 | Protein | Ty1-like NLS |
| | | E1B7L7-0 |
| 660 | Protein | Ty1-like NLS |
| | | Q08DU1-0 |
| 661 | Protein | Ty1-like NLS |
| | | Q0III3-0 |
| 662 | Protein | Ty1-like NLS |
| | | Q17QH9-0 |
| 663 | Protein | Ty1-like NLS |
| | | Q29S22-0 |
| 664 | Protein | Ty1-like NLS |
| | | Q2KIQ2-0 |
| 665 | Protein | Ty1-like NLS |
| | | Q2KJE1-0 |
| 666 | Protein | Ty1-like NLS |
| | | Q2KJE1-1 |
| 667 | Protein | Ty1-like NLS |
| | | Q2TBX7-0 |
| 668 | Protein | Ty1-like NLS |
| | | Q4R7K1-0 |
| 669 | Protein | Ty1-like NLS |
| | | Q4R8Y5-0 |
| 670 | Protein | Ty1-like NLS |
| | | Q58DE2-0 |
| 671 | Protein | Ty1-like NLS |
| | | Q58DU0-0 |
| 672 | Protein | Ty1-like NLS |
| | | Q5E9U4-0 |
| 673 | Protein | Ty1-like NLS |
| | | Q5NVM2-0 |
| 674 | Protein | Ty1-like NLS |
| | | Q5R4V4-0 |
| 675 | Protein | Ty1-like NLS |
| | | Q5R8B0-0 |
| 676 | Protein | Ty1-like NLS |
| | | Q5RB69-0 |
| 677 | Protein | Ty1-like NLS |
| | | Q5RCE6-0 |
| 678 | Protein | Ty1-like NLS |
| | | Q5TM61-0 |
| 679 | Protein | Ty1-like NLS |
| | | Q767K9-0 |
| 680 | Protein | Ty1-like NLS |
| | | Q7YQM3-0 |
| 681 | Protein | Ty1-like NLS |
| | | Q7YQM4-0 |
| 682 | Protein | Ty1-like NLS |
| | | Q7YR38-0 |
| 683 | Protein | Ty1-like NLS |
| | | Q95KD7-0 |
| 684 | Protein | Ty1-like NLS |
| | | Q95LG8-0 |
| 685 | Protein | Ty1-like NLS |
| | | Q9N1Q7-0 |
| 686 | Protein | Ty1-like NLS |
| | | A2WSD3-0 |
| 687 | Protein | Ty1-like NLS |
| | | A2XVF7-0 |
| 688 | Protein | Ty1-like NLS |
| | | A2XVF7-1 |
| 689 | Protein | Ty1-like NLS |
| | | A2XVF7-2 |
| 690 | Protein | Ty1-like NLS |
| | | A2XVF7-3 |
| 691 | Protein | Ty1-like NLS |
| | | A3AVH5-0 |
| 692 | Protein | Ty1-like NLS |
| | | A3AVH5-1 |
| 693 | Protein | Ty1-like NLS |
| | | A3AVH5-2 |
| 694 | Protein | Ty1-like NLS |
| | | A3AVH5-3 |
| 695 | Protein | Ty1-like NLS |
| | | A4QJZ0-0 |
| 696 | Protein | Ty1-like NLS |
| | | A4QK78-0 |
| 697 | Protein | Ty1-like NLS |
| | | A4QKG5-0 |
| 698 | Protein | Ty1-like NLS |
| | | A4QKQ3-0 |
| 699 | Protein | Ty1-like NLS |
| | | A6MN03-0 |
| 700 | Protein | Ty1-like NLS |
| | | A8MS85-0 |
| 701 | Protein | Ty1-like NLS |
| | | A9XMT3-0 |
| 702 | Protein | Ty1-like NLS |
| | | B8YIE8-0 |
| 703 | Protein | Ty1-like NLS |
| | | F4HVZ5-0 |
| 704 | Protein | Ty1-like NLS |
| | | F4IQK5-0 |
| 705 | Protein | Ty1-like NLS |
| | | F4IQK5-1 |
| 706 | Protein | Ty1-like NLS |
| | | O22812-0 |
| 707 | Protein | Ty1-like NLS |
| | | O49323-0 |
| 708 | Protein | Ty1-like NLS |
| | | O64571-0 |
| 709 | Protein | Ty1-like NLS |
| | | O64639-0 |
| 710 | Protein | Ty1-like NLS |
| | | O64639-1 |
| 711 | Protein | Ty1-like NLS |
| | | O64639-2 |
| 712 | Protein | Ty1-like NLS |
| | | O65743-0 |
| 713 | Protein | Ty1-like NLS |
| | | O81072-0 |
| 714 | Protein | Ty1-like NLS |
| | | P09975-0 |
| 715 | Protein | Ty1-like NLS |
| | | P0C262-0 |
| 716 | Protein | Ty1-like NLS |
| | | P29345-0 |
| 717 | Protein | Ty1-like NLS |
| | | P50888-0 |
| 718 | Protein | Ty1-like NLS |
| | | P51269-0 |
| 719 | Protein | Ty1-like NLS |
| | | P51430-0 |
| 720 | Protein | Ty1-like NLS |
| | | Q06FP6-0 |
| 721 | Protein | Ty1-like NLS |
| | | Q06FP6-1 |
| 722 | Protein | Ty1-like NLS |
| | | Q06FP6-2 |
| 723 | Protein | Ty1-like NLS |
| | | Q06R72-0 |
| 724 | Protein | Ty1-like NLS |
| | | Q06R98-0 |
| 725 | Protein | Ty1-like NLS |
| | | Q1KVQ9-0 |
| 726 | Protein | Ty1-like NLS |
| | | Q1XDL7-0 |
| 727 | Protein | Ty1-like NLS |
| | | Q38873-0 |
| 728 | Protein | Ty1-like NLS |
| | | Q3E8X3-0 |
| 729 | Protein | Ty1-like NLS |
| | | Q3ZJ77-0 |
| 730 | Protein | Ty1-like NLS |
| | | Q42438-0 |
| 731 | Protein | Ty1-like NLS |
| | | Q4V3E0-0 |
| 732 | Protein | Ty1-like NLS |
| | | Q66GN2-0 |
| 733 | Protein | Ty1-like NLS |
| | | Q6K5K2-0 |
| 734 | Protein | Ty1-like NLS |
| | | Q6YS30-0 |
| 735 | Protein | Ty1-like NLS |
| | | Q84WK0-0 |
| 736 | Protein | Ty1-like NLS |
| | | Q84Y18-0 |
| 737 | Protein | Ty1-like NLS |
| | | Q8H991-0 |
| 738 | Protein | Ty1-like NLS |
| | | Q8RWY7-0 |
| 739 | Protein | Ty1-like NLS |
| | | Q8RWY7-1 |
| 740 | Protein | Ty1-like NLS |
| | | Q8VZ67-0 |
| 741 | Protein | Ty1-like NLS |
| | | Q8VZN4-0 |
| 742 | Protein | Ty1-like NLS |
| | | Q8W0K2-0 |
| 743 | Protein | Ty1-like NLS |
| | | Q8W490-0 |
| 744 | Protein | Ty1-like NLS |
| | | Q9CAE4-0 |
| 745 | Protein | Ty1-like NLS |
| | | Q9FMZ4-0 |
| 746 | Protein | Ty1-like NLS |
| | | Q9FMZ4-1 |
| 747 | Protein | Ty1-like NLS |
| | | Q9FRI0-0 |
| 748 | Protein | Ty1-like NLS |
| | | Q9LKI5-0 |
| 749 | Protein | Ty1-like NLS |
| | | Q9LUJ5-0 |
| 750 | Protein | Ty1-like NLS |
| | | Q9LUR0-0 |
| 751 | Protein | Ty1-like NLS |
| | | Q9LVU8-0 |
| 752 | Protein | Ty1-like NLS |
| | | Q9LVU8-1 |
| 753 | Protein | Ty1-like NLS |
| | | Q9LYK7-0 |
| 754 | Protein | Ty1-like NLS |
| | | Q9M020-0 |
| 755 | Protein | Ty1-like NLS |
| | | Q9M1L7-0 |
| 756 | Protein | Ty1-like NLS |
| | | Q9M3V8-0 |
| 757 | Protein | Ty1-like NLS |
| | | Q9SRQ3-0 |
| 758 | Protein | Ty1-like NLS |
| | | Q9ZPV5-0 |
| 759 | Protein | Ty1-like NLS |
| | | B1AQJ2-0 |
| 760 | Protein | Ty1-like NLS |
| | | D3ZUI5-0 |
| 761 | Protein | Ty1-like NLS |
| | | D4A666-0 |
| 762 | Protein | Ty1-like NLS |
| | | E1U8D0-0 |
| 763 | Protein | Ty1-like NLS |
| | | G3V8T1-0 |
| 764 | Protein | Ty1-like NLS |
| | | O35821-0 |
| 765 | Protein | Ty1-like NLS |
| | | O88487-0 |
| 766 | Protein | Ty1-like NLS |
| | | O88665-0 |
| 767 | Protein | Ty1-like NLS |
| | | P61364-0 |
| 768 | Protein | Ty1-like NLS |
| | | P61365-0 |
| 769 | Protein | Ty1-like NLS |
| | | P83858-0 |
| 770 | Protein | Ty1-like NLS |
| | | P83861-0 |
| 771 | Protein | Ty1-like NLS |
| | | Q00566-0 |
| 772 | Protein | Ty1-like NLS |
| | | Q05CL8-0 |
| 773 | Protein | Ty1-like NLS |
| | | Q09XV5-0 |
| 774 | Protein | Ty1-like NLS |
| | | Q3TFK5-0 |
| 775 | Protein | Ty1-like NLS |
| | | Q3TFK5-1 |
| 776 | Protein | Ty1-like NLS |
| | | Q3TFK5-2 |
| 777 | Protein | Ty1-like NLS |
| | | Q3TYA6-0 |
| 778 | Protein | Ty1-like NLS |
| | | Q3UMF0-0 |
| 779 | Protein | Ty1-like NLS |
| | | Q498U4-0 |
| 780 | Protein | Ty1-like NLS |
| | | Q4V7C4-0 |
| 781 | Protein | Ty1-like NLS |
| | | Q4V8G7-0 |
| 782 | Protein | Ty1-like NLS |
| | | Q505I5-0 |
| 783 | Protein | Ty1-like NLS |
| | | Q562C7-0 |
| 784 | Protein | Ty1-like NLS |
| | | Q566R3-0 |
| 785 | Protein | Ty1-like NLS |
| | | Q566R3-1 |
| 786 | Protein | Ty1-like NLS |
| | | Q566R3-2 |
| 787 | Protein | Ty1-like NLS |
| | | Q58A65-0 |
| 788 | Protein | Ty1-like NLS |
| | | Q5NBX1-0 |
| 789 | Protein | Ty1-like NLS |
| | | Q5XG71-0 |
| 790 | Protein | Ty1-like NLS |
| | | Q5XI01-0 |
| 791 | Protein | Ty1-like NLS |
| | | Q5XIB5-0 |
| 792 | Protein | Ty1-like NLS |
| | | Q5XIR6-0 |
| 793 | Protein | Ty1-like NLS |
| | | Q60848-0 |
| 794 | Protein | Ty1-like NLS |
| | | Q62018-0 |
| 795 | Protein | Ty1-like NLS |
| | | Q62018-1 |
| 796 | Protein | Ty1-like NLS |
| | | Q62187-0 |
| 797 | Protein | Ty1-like NLS |
| | | Q62871-0 |
| 798 | Protein | Ty1-like NLS |
| | | Q63520-0 |
| 799 | Protein | Ty1-like NLS |
| | | Q642C0-0 |
| 800 | Protein | Ty1-like NLS |
| | | Q68SB1-0 |
| 801 | Protein | Ty1-like NLS |
| | | Q6AYK5-0 |
| 802 | Protein | Ty1-like NLS |
| | | Q6NZB0-0 |
| 803 | Protein | Ty1-like NLS |
| | | Q76KJ5-0 |
| 804 | Protein | Ty1-like NLS |
| | | Q76KJ5-1 |
| 805 | Protein | Ty1-like NLS |
| | | Q76KJ5-2 |
| 806 | Protein | Ty1-like NLS |
| | | Q78WZ7-0 |
| 807 | Protein | Ty1-like NLS |
| | | Q78WZ7-1 |
| 808 | Protein | Ty1-like NLS |
| | | Q7TNB4-0 |
| 809 | Protein | Ty1-like NLS |
| | | Q7TPV4-0 |
| 810 | Protein | Ty1-like NLS |
| | | Q80WC1-0 |
| 811 | Protein | Ty1-like NLS |
| | | Q80Z37-0 |
| 812 | Protein | Ty1-like NLS |
| | | Q811R2-0 |
| 813 | Protein | Ty1-like NLS |
| | | Q8BKA3-0 |
| 814 | Protein | Ty1-like NLS |
| | | Q8CJ67-0 |
| 815 | Protein | Ty1-like NLS |
| | | Q8K214-0 |
| 816 | Protein | Ty1-like NLS |
| | | Q8K4T4-0 |
| 817 | Protein | Ty1-like NLS |
| | | Q8R5F3-0 |
| 818 | Protein | Ty1-like NLS |
| | | Q91X13-0 |
| 819 | Protein | Ty1-like NLS |
| | | Q9CS72-0 |
| 820 | Protein | Ty1-like NLS |
| | | Q9CVI2-0 |
| 821 | Protein | Ty1-like NLS |
| | | Q9CWX9-0 |
| 822 | Protein | Ty1-like NLS |
| | | Q9CZX5-0 |
| 823 | Protein | Ty1-like NLS |
| | | Q9D1J3-0 |
| 824 | Protein | Ty1-like NLS |
| | | Q9D3V1-0 |
| 825 | Protein | Ty1-like NLS |
| | | Q9DBQ9-0 |
| 826 | Protein | Ty1-like NLS |
| | | Q9JIX5-0 |
| 827 | Protein | Ty1-like NLS |
| | | Q9JJ80-0 |
| 828 | Protein | Ty1-like NLS |
| | | Q9JJ89-0 |
| 829 | Protein | Ty1-like NLS |
| | | Q9R1C7-0 |
| 830 | Protein | Ty1-like NLS |
| | | Q9R1X4-0 |
| 831 | Protein | Ty1-like NLS |
| | | Q9Z180-0 |
| 832 | Protein | Ty1-like NLS |
| | | Q9Z207-0 |
| 833 | Protein | Ty1-like NLS |
| | | Q9Z2D6-0 |
| 834 | Protein | Ty1-like NLS |
| | | A0A1L8GSA2-0 |
| 835 | Protein | Ty1-like NLS |
| | | A0JP82-0 |
| 836 | Protein | Ty1-like NLS |
| | | A1A5I1-0 |
| 837 | Protein | Ty1-like NLS |
| | | A1L2T6-0 |
| 838 | Protein | Ty1-like NLS |
| | | A2RUV0-0 |
| 839 | Protein | Ty1-like NLS |
| | | A9JRD8-0 |
| 840 | Protein | Ty1-like NLS |
| | | E7F568-0 |
| 841 | Protein | Ty1-like NLS |
| | | F1QFU0-0 |
| 842 | Protein | Ty1-like NLS |
| | | F1QWK4-0 |
| 843 | Protein | Ty1-like NLS |
| | | K9JHZ4-0 |
| 844 | Protein | Ty1-like NLS |
| | | P07193-0 |
| 845 | Protein | Ty1-like NLS |
| | | P0CB65-0 |
| 846 | Protein | Ty1-like NLS |
| | | P12957-0 |
| 847 | Protein | Ty1-like NLS |
| | | P13505-0 |
| 848 | Protein | Ty1-like NLS |
| | | P21783-0 |
| 849 | Protein | Ty1-like NLS |
| | | Q28BS0-0 |
| 850 | Protein | Ty1-like NLS |
| | | Q28BS0-1 |
| 851 | Protein | Ty1-like NLS |
| | | Q28G05-0 |
| 852 | Protein | Ty1-like NLS |
| | | Q32N87-0 |
| 853 | Protein | Ty1-like NLS |
| | | Q3KPW4-0 |
| 854 | Protein | Ty1-like NLS |
| | | Q4QR29-0 |
| 855 | Protein | Ty1-like NLS |
| | | Q4QR29-1 |
| 856 | Protein | Ty1-like NLS |
| | | Q5BL56-0 |
| 857 | Protein | Ty1-like NLS |
| | | Q5XJK9-0 |
| 858 | Protein | Ty1-like NLS |
| | | Q5ZIJ0-0 |
| 859 | Protein | Ty1-like NLS |
| | | Q640I9-0 |
| 860 | Protein | Ty1-like NLS |
| | | Q6DEU9-0 |
| 861 | Protein | Ty1-like NLS |
| | | Q6DEU9-1 |
| 862 | Protein | Ty1-like NLS |
| | | Q6DEU9-2 |
| 863 | Protein | Ty1-like NLS |
| | | Q6DK85-0 |
| 864 | Protein | Ty1-like NLS |
| | | Q6DRI7-0 |
| 865 | Protein | Ty1-like NLS |
| | | Q6DRL5-0 |
| 866 | Protein | Ty1-like NLS |
| | | Q6NV26-0 |
| 867 | Protein | Ty1-like NLS |
| | | Q6NWI1-0 |
| 868 | Protein | Ty1-like NLS |
| | | Q6NYJ3-0 |
| 869 | Protein | Ty1-like NLS |
| | | Q6P4K1-0 |
| 870 | Protein | Ty1-like NLS |
| | | Q6WKW9-0 |
| 871 | Protein | Ty1-like NLS |
| | | Q7ZUF2-0 |
| 872 | Protein | Ty1-like NLS |
| | | Q7ZW47-0 |
| 873 | Protein | Ty1-like NLS |
| | | Q7ZXZ0-0 |
| 874 | Protein | Ty1-like NLS |
| | | Q7ZXZ0-1 |
| 875 | Protein | Ty1-like NLS |
| | | Q7ZYR8-0 |
| 876 | Protein | Ty1-like NLS |
| | | Q8AVQ6-0 |
| 877 | Protein | Ty1-like NLS |
| | | Q9DE07-0 |
| 878 | Protein | Ty1-like NLS |
| | | P03086-0 |
| 879 | Protein | Ty1-like NLS |
| | | P09814-0 |
| 880 | Protein | Ty1-like NLS |
| | | P0CK10-0 |
| 881 | Protein | Ty1-like NLS |
| | | P15075-0 |
| 882 | Protein | Ty1-like NLS |
| | | P51724-0 |
| 883 | Protein | Ty1-like NLS |
| | | P52344-0 |
| 884 | Protein | Ty1-like NLS |
| | | P52531-0 |
| 885 | Protein | Ty1-like NLS |
| | | Q5UP41-0 |
| 886 | Protein | Ty1-like NLS |
| | | Q9DUC0-0 |
| 887 | Protein | Ty1-like NLS |
| | | Q9XJS3-0 |
| 888 | Nucleic | 3xFLAG-Ty1 NLS- |
| | Acid | TALEN-INDC- |
| | | 40L |
| 889 | Nucleic | 3xFLAG-Ty1 NLS- |
| | Acid | TALEN-INDC- |
| | | 40R |
| 890 | Nucleic | 3xFLAG-Ty1 NLS- |
| | Acid | TALEN-INDC- |
| | | 44R |
| 891 | Nucleic | INDC-TALEN-Ty1 |
| | Acid | NLS-3xFLAG-41R |
| 892 | Nucleic | INDC-TALEN-Ty1 |
| | Acid | NLS-3xFLAG-45L |
| 893 | Nucleic | INDC-TALEN-Ty1 |
| | Acid | NLS-3xFLAG-45R |
| 894 | Nucleic | INDC-TALEN-Ty1 |
| | Acid | NLS-3xFLAG-48L |
| 895 | Nucleic | pCRII-amilCP |
| | Acid | |

[0394] The disclosures of each and every patent, patent application, and publication cited herein are hereby incorporated herein by reference in their entirety.

[0395] While this invention has been disclosed with reference to specific embodiments, it is apparent that other embodiments and variations of this invention may be devised by others skilled in the art without departing from the true spirit and scope of the invention. The appended claims are intended to be construed to include all such embodiments and equivalent variations.

The application's sequence listing, which the Patent Office published only in electronic form, follows.

SEQUENCE LISTING (895 sequences)

SEQ ID NO: 1 - protein, 288 aa, Artificial Sequence
  chemically synthesized
FLDGIDKAQDEHEKYHSNWRAMASDFNLPPVVAKEIVASCDKCQLKGEAMHGQVDCSPGIWQLDCTHLEGKVILVAVHVASGYIEAEVIPAETGQETAYFLLKLAGRWPVKTIHTDNGSNFTGATVRAACWWAGIKQEFGIPYNPQSQGVVESMNKELKKIIGQVRDQAEHLKTAVQMAVFIHNFKRKGGIGGYSAGERIVDIIATDIQTKELQKQITKIQNFRVYYRDSRNPLWKGPAKLLWKGEGAVVIQDNSDIKVVPRRKAKIIRDYGKQMAGDDCVASRQDED

SEQ ID NO: 2 - protein, 222 aa, Artificial Sequence
  chemically synthesized
FLDGIDKAQDEHEKYHSNWRAMASDFNLPPVVAKEIVASCDKCQLKGEAMHGQVDCSPGIWQLDCTHLEGKVILVAVHVASGYIEAEVIPAETGQETAYFLLKLAGRWPVKTIHTDNGSNFTGATVRAACWWAGIKQEFGIPYNPQSQGVVESMNKELKKIIGQVRDQAEHLKTAVQMAVFIHNFKRKGGIGGYSAGERIVDIIATDIQTKELQKQITKIQN

SEQ ID NO: 3 - protein, 459 aa, Artificial Sequence
  chemically synthesized
FLDGIDKAQDEHEKYHSNWRAMASDFNLPPVVAKEIVASCDKCQLKGEAMHGQVDCSPGIWQLDCTHLEGKVILVAVHVASGYIEAEVIPAETGQETAYFLLKLAGRWPVKTIHTDNGSNFTGATVRAACWWAGIKQEFGIPYNPQSQGVVESMNKELKKIIGQVRDQAEHLKTAVQMAVFIHNFKRKGGIGGYSAGERIVDIIATDIQTKELQKQITKIQNGGGGSGGGGSGGGGSFLDGIDKAQDEHEKYHSNWRAMASDFNLPPVVAKEIVASCDKCQLKGEAMHGQVDCSPGIWQLDCTHLEGKVILVAVHVASGYIEAEVIPAETGQETAYFLLKLAGRWPVKTIHTDNGSNFTGATVRAACWWAGIKQEFGIPYNPQSQGVVESMNKELKKIIGQVRDQAEHLKTAVQMAVFIHNFKRKGGIGGYSAGERIVDIIATDIQTKELQKQITKIQN

SEQ ID NO: 4 - protein, 288 aa, Artificial Sequence
  chemically synthesized
FLDGIDKAQDEHEKYHSNWRAMASDFNLPPVVAKEIVASCDKCQLKGEAMHGQVDCSPGIWQLDCTHLEGKVILVAVHVASGYIGAEVIPAETGQETAYFLLKLAGRWPVKTIHTDNGSNFTGATVRAACWWAGIKQEFGIPYNPQSQGVVESMNKELKKIIGQVRDQAEHLKTAVQMAVFIHNFKRKGGIGGYSAGERIVDIIATDIQTKELQKQITKIQNFRVYYRDSRNPLWKGPAKLLWKGEGAVVIQDNSDIKVVPRRKAKIIRDYGKQMAGDDCVASRQDED

SEQ ID NO: 5 - protein, 222 aa, Artificial Sequence
  chemically synthesized
FLDGIDKAQDEHEKYHSNWRAMASDFNLPPVVAKEIVASCDKCQLKGEAMHGQVDCSPGIWQLDCTHLEGKVILVAVHVASGYIGAEVIPAETGQETAYFLLKLAGRWPVKTIHTDNGSNFTGATVRAACWWAGIKQEFGIPYNPQSQGVVESMNKELKKIIGQVRDQAEHLKTAVQMAVFIHNFKRKGGIGGYSAGERIVDIIATDIQTKELQKQITKIQN

SEQ ID NO: 6 - protein, 288 aa, Artificial Sequence
  chemically synthesized
FLDGIDKAQDEHEKYHSNWRAMASDFNLPPVVAKEIVASCDKCQLKGEAMHGQVDCSPGIWQLDCTHLEGKVILVAVHVASGYIFAEVIPAETGQETAYFLLKLAGRWPVKTIHTDNGSNFTGATVRAACWWAGIKQEFGIPYNPQSQGVVESMNKELKKIIGQVRDQAEHLKTAVQMAVFIHNFKRKGGIGGYSAGERIVDIIATDIQTKELQKQITKIQNFRVYYRDSRNPLWKGPAKLLWKGEGAVVIQDNSDIKVVPRRKAKIIRDYGKQMAGDDCVASRQDED

SEQ ID NO: 7 - protein, 221 aa, Artificial Sequence
  chemically synthesized
FLDGIDKAQDEHEKYHSNWRAMASDFNLPPVVAKEIVASCDKCQLKGEAMHGQVDCSPGIWQLDCTHLEGKVILVAVHVASGYIFAEVIPAETGQETAYFLLKLAGRWPVKTIHTDNGSNFTGATVRAACWWAGIKQEFGIPYNPQSQGVVESMNKELKKIIGQVRDQAEHLKTAVQMAVFIHNFKRKGGIGGYSAGERIVDIIATDIQTKELQKQTKIQN

SEQ ID NO: 8 - protein, 288 aa, Artificial Sequence
  chemically synthesized
FLDGIDKAQDEHEKYHSNWRAMASDFNLPPVVAKEIVASCDKCQLKGEAMHGQVDCSPGIWQLDCTHLEGKVILVAVHVASGYIEAEVIPAETGQETAYFLLKLAGRWPVKTIHTNNGSNFTGATVRAACWWAGIKQEFGIPYNPQSQGVVESMNKELKKIIGQVRDQAEHLKTAVQMAVFIHNFKRKGGIGGYSAGERIVDIIATDIQTKELQKQITKIQNFRVYYRDSRNPLWKGPAKLLWKGEGAVVIQDNSDIKVVPRRKAKIIRDYGKQMAGDDCVASRQDED

SEQ ID NO: 9 - protein, 222 aa, Artificial Sequence
  chemically synthesized
FLDGIDKAQDEHEKYHSNWRAMASDFNLPPVVAKEIVASCDKCQLKGEAMHGQVDCSPGIWQLDCTHLEGKVILVAVHVASGYIEAEVIPAETGQETAYFLLKLAGRWPVKTIHTNNGSNFTGATVRAACWWAGIKQEFGIPYNPQSQGVVESMNKELKKIIGQVRDQAEHLKTAVQMAVFIHNFKRKGGIGGYSAGERIVDIIATDIQTKELQKQITKIQN

SEQ ID NO: 10 - protein, 288 aa, Artificial Sequence
  chemically synthesized
FLDGIDKAQDEHEKYHSNWRAMASDFNLPPVVAKEIVASCDKCQLKGEAMHGQVDCSPGIWQLDCTHLEGKVILVAVHVASGYIEAEVIPAETGQETAYFLLKLAGRWPVKTIHTDNGSNFTGATVRAACWWAGIKQEFGIPYNPQSQGVVESMNKELKKIIGQVRDQAEHLKTAVQMAVFIHNKKRKGGIGGYSAGERIVDIIATDIQTKELQKQITKIQNFRVYYRDSRNPLWKGPAKLLWKGEGAVVIQDNSDIKVVPRRKAKIIRDYGKQMAGDDSVASRQDED

SEQ ID NO: 11 - protein, 288 aa, Artificial Sequence
  chemically synthesized
FLDGIDKAQDEHEKYHSNWRAMASDFNLPPVVAKEIVASCDKCQLKGEAMHGQVDCSPGIWQLDCTHLEGKVILVAVHVASGYIEAEVIPAETGQETAYFLLKLAGRWPVKTIHTDNGSNFTGATVRAACWWAGIKQEFGIPYNPQSQGVVESMNKELKKIIGQVRDQAEHLKTAVQMAVFIHNFKRKGGIGGYSAGERIVDIIATDIQTKELQKQITKIQNFRVYYRDSRNPLWKGPAKLLWKGEGAVVIQDNSDIKVVPRRKAKIIRDYGKQMAGDDSVASRQDED

SEQ ID NO: 12 - protein, 288 aa, Artificial Sequence
  chemically synthesized
FLDGIDKAQDEHEKYHSNWRAMASDFNLPPVVAKEIVASCDKCQLKGEAMHGQVDCSPGIWQLDCTHLEGKVILVAVHVASGYIEAEVIPAETGQETAYFLLKLAGRWPVKTIHTDNGSNFTGATVRAACWWAGIKQEFGIPYNPQSQGVVESMNKELKKIIGQVRDQAEHLKTAVQMAVFIHNKKRKGGIGGYSAGERIVDIIATDIQTKELQKQITKIQNFRVYYRDSRNPLWKGPAKLLWKGEGAVVIQDNSDIKVVPRRKAKIIRDYGKQMAGDDCVASRQDED

SEQ ID NO: 13 - protein, 222 aa, Artificial Sequence
  chemically synthesized
FLDGIDKAQDEHEKYHSNWRAMASDFNLPPVVAKEIVASCDKCQLKGEAMHGQVDCSPGIWQLDCTHLEGKVILVAVHVASGYIEAEVIPAETGQETAYFLLKLAGRWPVKTIHTDNGSNFTGATVRAACWWAGIKQEFGIPYNPQSQGVVESMNKELKKIIGQVRDQAEHLKTAVQMAVFIHNKKRKGGIGGYSAGERIVDIIATDIQTKELQKQITKIQN

SEQ ID NO: 14 - protein, 288 aa, Artificial Sequence
  chemically synthesized
FLDGIDKAQDEHEKYHSNWRAMASDFNLPPVVAKEIVASCDKCQLKGEAMHGQVDCSPGIWQLDCTHLEGKVILVAVHVASGYIEAEVIPAETGQEAAYFLLKLAGRWPVKTIHTDNGSNFTGATVRAACWWAGIKQEFGIPRNPQSQGVVESMNKELKKIIGQVRDQAEHLKTAVQMAVFIHNFKRKGGIGGYSAGERIVDIIATDIQTKELQKQITKIQNFRVYYRDSRNPLWKGPAKLLWKGEGAVVIQDNSDIKVVPRRKAKIIRDYGKQMAGDDCVASRQDED

SEQ ID NO: 15 - protein, 222 aa, Artificial Sequence
  chemically synthesized
FLDGIDKAQDEHEKYHSNWRAMASDFNLPPVVAKEIVASCDKCQLKGEAMHGQVDCSPGIWQLDCTHLEGKVILVAVHVASGYIEAEVIPAETGQEAAYFLLKLAGRWPVKTIHTDNGSNFTGATVRAACWWAGIKQEFGIPRNPQSQGVVESMNKELKKIIGQVRDQAEHLKTAVQMAVFIHNFKRKGGIGGYSAGERIVDIIATDIQTKELQKQITKIQN

SEQ ID NO: 16 - protein, 288 aa, Artificial Sequence
  chemically synthesized
FLDGIDKAQDEHEKYHSNWRAMASDFNLPPVVAKEIVASCDKCQLKGEAMHGQVDCSPGIWQLDCTHLEGKVILVAVHVASGYIEAEVIPAETGQETAYFLLKLAGRWPVKTIHTDNGSNFTGATVRAACWWAGIKQEFSIPYNPQSHGVVESMNKELKKIIGQVRDQAEHLKTAVQMAVFIHNFKRKGGIGGYSAGERIVDIIATDIQTKELQKQITKIQNFRVYYRDSRNPLWKGPAKLLWKGEGAVVIQDNSDIKVVPRRKAKIIRDYGKQMAGDDCVASRQDED

SEQ ID NO: 17 - protein, 222 aa, Artificial Sequence
  chemically synthesized
FLDGIDKAQDEHEKYHSNWRAMASDFNLPPVVAKEIVASCDKCQLKGEAMHGQVDCSPGIWQLDCTHLEGKVILVAVHVASGYIEAEVIPAETGQETAYFLLKLAGRWPVKTIHTDNGSNFTGATVRAACWWAGIKQEFSIPYNPQSHGVVESMNKELKKIIGQVRDQAEHLKTAVQMAVFIHNFKRKGGIGGYSAGERIVDIIATDIQTKELQKQITKIQN

SEQ ID NO: 18 - protein, 323 aa, Artificial Sequence
  chemically synthesized
PLREAKDLHTALHIGPRALSKACNISMQQAREVVQTCPHCNSAPALEAGVNPRGLGPLQIWQTDFTLEPRMAPRSWLAVTVDTASSAIVVTQHGRVTSVAVQHHWATAIAVLGRPKAIKTDNGSCFTSKSTREWLARWGIAHTTGIPGNSQGQAMVERANRLLKDRIRVLAEGDGFMKRIPTSKQGELLAKAMYALNHFERGENTKTPIQKHWRPTVLTEGPPVKIRIETGEWEKGWNVLVWGRGYAAVKNRDTDKVIWVPSRKVKPDITQKDEVTKKDEASPLFAGISDWIPWEDEQEGLQGETASNKQERPGEDTLAANES

SEQ ID NO: 19 - protein, 221 aa, Artificial Sequence
  chemically synthesized
PLREAKDLHTALHIGPRALSKACNISMQQAREVVQTCPHCNSAPALEAGVNPRGLGPLQIWQTDFTLEPRMAPRSWLAVTVDTASSAIVVTQHGRVTSVAVQHHWATAIAVLGRPKAIKTDNGSCFTSKSTREWLARWGIAHTTGIPGNSQGQAMVERANRLLKDRIRVLAEGDGFMKRIPTSKQGELLAKAMYALNHFERGENTKTPIQKHWRPTVLTEG

SEQ ID NO: 20 - protein, 392 aa, Artificial Sequence
  chemically synthesized
CNTKKPNLDAELDQLLQGHYIKGYPKQYTYFLEDGKVKVSRPEGVKIIPPQSDRQKIVLQAHNLAHTGREATLLKIANLYWWPNMRKDVVKQLGRCQQCLITNASNKASGPILRPDRPQKPFDKFFIDYIGPLPPSQGYLYVLVVVDGMTGFTWLYPTKAPSTSATVKSLNVLTSIAIPKVIHSDQGAAFTSSTFAEWAKERGIHLEFSTPYHPQSGSKVERKNSDIKRLLTKLLVGRPTKWYDLLPVVQLALNNTYSPVLKYTPHQLLFGIDSNTPFANQDTLDLTREEELSLLQEIRTSLYHPSTPPASSRSWSPVVGQLVQERVARPASLRPRWHKPSTVLKVLNPRTVVILDHLGNNRTVSIDNLKPTSHQNGTTNDTATMDHLEKNE

SEQ ID NO: 21 - protein, 316 aa, Artificial Sequence
  chemically synthesized
CNTKKPNLDAELDQLLQGHYIKGYPKQYTYFLEDGKVKVSRPEGVKIIPPQSDRQKIVLQAHNLAHTGREATLLKIANLYWWPNMRKDVVKQLGRCQQCLITNASNKASGPILRPDRPQKPFDKFFIDYIGPLPPSQGYLYVLVVVDGMTGFTWLYPTKAPSTSATVKSLNVLTSIAIPKVIHSDQGAAFTSSTFAEWAKERGIHLEFSTPYHPQSGSKVERKNSDIKRLLTKLLVGRPTKWYDLLPVVQLALNNTYSPVLKYTPHQLLFGIDSNTPFANQDTLDLTREEELSLLQEIRTSLYHPSTPPASSRSWS

SEQ ID NO: 22 - protein, 277 aa, Artificial Sequence
  chemically synthesized
GSTGVFWVENIQEAQDEHENWHTSPKILARNYKIPLTVAKQITQECPHCTKQGSGPAGCVMRSPNHWQADCTHLDNKIILTFVESNSGYIHATLLSKENALCTSLAILEWARLFSPKSLHTDNGTNFVAEPVVNLLKFLKIAHTTGIPYHPESQGIVERANRTLKEKIQSHRDNTQTLEAALQLALITCNKGRESMGGQTPWEVFITNQAQVIHEKLLLQQAQSSKKFCFYKIPGEHDWKGPTRVLWKGDGAVVVNDEGKGIIAVPLTRTKLLIKPN

SEQ ID NO: 23 - protein, 225 aa, Artificial Sequence
  chemically synthesized
GSTGVFWVENIQEAQDEHENWHTSPKILARNYKIPLTVAKQITQECPHCTKQGSGPAGCVMRSPNHWQADCTHLDNKIILTFVESNSGYIHATLLSKENALCTSLAILEWARLFSPKSLHTDNGTNFVAEPVVNLLKFLKIAHTTGIPYHPESQGIVERANRTLKEKIQSHRDNTQTLEAALQLALITCNKGRESMGGQTPWEVFITNQAQVIHEKLLLQQAQSS

SEQ ID NO: 24 - protein, 408 aa, Artificial Sequence
  chemically synthesized
IENSSPYTSEHFHYTVTDIKDLTKLGAIYDKTKKYWVYQGKPVMPDQFTFELLDFLHQLTHLSFSKMKALLERSHSPYYMLNRDRTLKNITETCKACAQVNASKSAVKQGTRVRGHRPGTHWEIDFTEIKPGLYGYKYLLVFIDTFSGWIEAFPTKKETAKVVTKKLLEEIFPRFGMPQVLGTDNGPAFVSKVSQTVADLLGIDWKLHCAYRPQSSGQVERMNRTIKETLTKLTLATGSRDWVLLLPLALYRARNTPGPHGLTPYEILYGAPPPLVNFPDPDMTRVTNSPSLQAHLQALYLVQHEVWRPLAAAYQEQLDRPVVPHPYRVGDTVWVRRHQTKNLEPRWKGPYTVLLTTPTALKVDGIAAWIHAAHVKAADPGGGPSSRLTWRVQRSQNPLKIRLTREAP

SEQ ID NO: 25 - protein, 326 aa, Artificial Sequence
  chemically synthesized
IENSSPYTSEHFHYTVTDIKDLTKLGAIYDKTKKYWVYQGKPVMPDQFTFELLDFLHQLTHLSFSKMKALLERSHSPYYMLNRDRTLKNITETCKACAQVNASKSAVKQGTRVRGHRPGTHWEIDFTEIKPGLYGYKYLLVFIDTFSGWIEAFPTKKETAKVVTKKLLEEIFPRFGMPQVLGTDNGPAFVSKVSQTVADLLGIDWKLHCAYRPQSSGQVERMNRTIKETLTKLTLATGSRDWVLLLPLALYRARNTPGPHGLTPYEILYGAPPPLVNFPDPDMTRVTNSPSLQAHLQALYLVQHEVWRPLAAAYQEQLDRPVVPHP

SEQ ID NO: 26 - protein, 318 aa, Artificial Sequence
  chemically synthesized
LESAQESHALHHQNAAALRFQFHITREQAREIVKLCPNCPDWGHAPQLGVNPRGLKPRVLWQMDVTHVSEFGKLKYVHVTVDTYSHFTFATARTGEATKDVLQHLAQSFAYMGIPQKIKTDNAPAYVSRSIQEFLARWKISHVTGIPYNPQGQAIVERTHQNIKAQLNKLQKAGKYYTPHHLLAHALFVLNHVNMDNQGHTAAERHWGPISADPKPMVMWKDLLTGSWKGPDVLITAGRGYACVFPQDAETPIWVPDRFIRPFTERKEATPTPGTAEKTPPRDEKDQQESPKNESSPHQREDGLATSAGVDLRSGGGP

SEQ ID NO: 27 - protein, 212 aa, Artificial Sequence
  chemically synthesized
LESAQESHALHHQNAAALRFQFHITREQAREIVKLCPNCPDWGHAPQLGVNPRGLKPRVLWQMDVTHVSEFGKLKYVHVTVDTYSHFTFATARTGEATKDVLQHLAQSFAYMGIPQKIKTDNAPAYVSRSIQEFLARWKISHVTGIPYNPQGQAIVERTHQNIKAQLNKLQKAGKYYTPHHLLAHALFVLNHVNMDNQGHTAAERHWGPISA

SEQ ID NO: 28 - protein, 380 aa, Artificial Sequence
  chemically synthesized
VLKKGDALASTDLVMEYSETDEKFTAGAELHDGVFMRGDLIVPPLEMLHAILLAIHGVSHTHKGGIMSYFSKFWTHPKASQTIDLILGHCQICLKHNPKYKSRLQGHRPLPSRPFAHLQIDFVQMCVKKPMYALVIIDVFSKWPEIIPCNKEDAKTVCDILMKDIIPRWGLPDQIDSDQGTHFTAKISQELTHSIGVAWKLHCPGHPRSSGIVERTNRTLKSKIIKAQEQLQLSKWTEVLPYVLLEMRATPKKHGLSPHEIVMGRPMKTTYLSDMSPLWATDTLVTYMNKLTRQLSAYHQQVVDQWPSTSLPPGPEPGSWCMLRNPKKSSNWEGPFLILLSTPTAVKVEGRPTWIHLDHCKLLRSSLSSSLGGPVNQLLS

SEQ ID NO: 29 - protein, 311 aa, Artificial Sequence
  chemically synthesized
VLKKGDALASTDLVMEYSETDEKFTAGAELHDGVFMRGDLIVPPLEMLHAILLAIHGVSHTHKGGIMSYFSKFWTHPKASQTIDLILGHCQICLKHNPKYKSRLQGHRPLPSRPFAHLQIDFVQMCVKKPMYALVIIDVFSKWPEIIPCNKEDAKTVCDILMKDIIPRWGLPDQIDSDQGTHFTAKISQELTHSIGVAWKLHCPGHPRSSGIVERTNRTLKSKIIKAQEQLQLSKWTEVLPYVLLEMRATPKKHGLSPHEIVMGRPMKTTYLSDMSPLWATDTLVTYMNKLTRQLSAYHQQVVDQWPSTSL

SEQ ID NO: 30 - protein, 296 aa, Artificial Sequence
  chemically synthesized
LPLETPEQWHKLTHCNSRALSRWPNPRISAWDPRSPATLCETCQKLNPTGGGKMRTIQRGWAPNHIWQADITHYKYKQFTYALHVFVDTYSGATHASAKRGLTTQMTIEGLLEAIVHLGRPKKLNTDQGANYTSKTFVRFCQQFGVSLSHHVPYNPTSSGLVERTNGLLKLLLSKYHLDEPHLPMTQALSRALWTHNQINLLPILKTRWELHHSPPLAVISEGGETPKGSDKLFLYKLPGQNNRRWLGPLPALVEASGGALLATDPPVWVPWRLLKAFKCLKNDGPEDAHNRSSDG

SEQ ID NO: 31 - protein, 227 aa, Artificial Sequence
  chemically synthesized
LPLETPEQWHKLTHCNSRALSRWPNPRISAWDPRSPATLCETCQKLNPTGGGKMRTIQRGWAPNHIWQADITHYKYKQFTYALHVFVDTYSGATHASAKRGLTTQMTIEGLLEAIVHLGRPKKLNTDQGANYTSKTFVRFCQQFGVSLSHHVPYNPTSSGLVERTNGLLKLLLSKYHLDEPHLPMTQALSRALWTHNQINLLPILKTRWELHHSPPLAVISEGGETP

SEQ ID NO: 32 - protein, 293 aa, Artificial Sequence
  chemically synthesized
FLEKIEPAQEEHDKYHSNVKELVFKFGLPRIVARQIVDTCDKCHQKGEAIHGQANSDLGTWQMDCTHLEGKIIIVAVHVASGFIEAEVIPQETGRQTALFLLKLAGRWPITHLHTDNGANFASQEVKMVAWWAGIEHTFGVPYNPQSQGVVEAMNHHLKNQIDRIREQANSVETIVLMAVHCMNFKRRGGIGDMTPAERLINMITTEQEIQFQQSKNSKFKNFRVYYREGRDQLWKGPGELLWKGEGAVILKVGTDIKVVPRRKAKIIKDYGGGKEVDSSSHMEDTGEAREVA

SEQ ID NO: 33 - protein, 222 aa, Artificial Sequence
  chemically synthesized
FLEKIEPAQEEHDKYHSNVKELVFKFGLPRIVARQIVDTCDKCHQKGEAIHGQANSDLGTWQMDCTHLEGKIIIVAVHVASGFIEAEVIPQETGRQTALFLLKLAGRWPITHLHTDNGANFASQEVKMVAWWAGIEHTFGVPYNPQSQGVVEAMNHHLKNQIDRIREQANSVETIVLMAVHCMNFKRRGGIGDMTPAERLINMITTEQEIQFQQSKNSKFKN

SEQ ID NO: 34 - protein, 281 aa, Artificial Sequence
  chemically synthesized
SSWVDRIEEAEINHEKFHSDPQYLRTEFNLPKMVAEEIRRKCPVCRIRGEQVGGQLKIGPGIWQMDCTHFDGKIILVGIHVESGYIWAQIISQETADCTVKAVLQLLSAHNVTELQTDNGPNFKNQKMEGVLNYMGVKHKFGIPGNPQSQALVENVNHTLKVWIRKFLPETTSLDNALSLAVHSLNFKRRGRIGGMAPYELLAQQESLRIQDYFSAIPQKLQAQWIYYKDQKDKKWKGPMRVEYWGQGSVLLKDEEKGYFLIPRRHIRRVPEPCALPEGDE

SEQ ID NO: 35 - protein, 223 aa, Artificial Sequence
  chemically synthesized
SSWVDRIEEAEINHEKFHSDPQYLRTEFNLPKMVAEEIRRKCPVCRIRGEQVGGQLKIGPGIWQMDCTHFDGKIILVGIHVESGYIWAQIISQETADCTVKAVLQLLSAHNVTELQTDNGPNFKNQKMEGVLNYMGVKHKFGIPGNPQSQALVENVNHTLKVWIRKFLPETTSLDNALSLAVHSLNFKRRGRIGGMAPYELLAQQESLRIQDYFSAIPQKLQA

SEQ ID NO: 36 - protein, 281 aa, Artificial Sequence
  chemically synthesized
TCFLENIPSATEDHERWHTSPDILVRQFHLPKRIAKEIVARCQECKRTTTSPVRGTNPRGRFLWQMDNTHWNKTIIWVAVETNSGLVEAQVIPEETALQVALCILQLIQRYTVLHLHSDNGPCFTAHRIENLCKYLGITKTTGIPYNPQSQGVVERAHRDLKDRLAAYQGDCETVEAALSLALVSLNKKRGGIGGHTPYEIYLESEHTKYQDQLEQQFSKQKIEKWCYVRNRRKEWKGPYKVLWDGDGAAVIEEEGKTALYPHRHMRFIPPPDSDIQDGSS

SEQ ID NO: 37 - protein, 224 aa, Artificial Sequence
  chemically synthesized
TCFLENIPSATEDHERWHTSPDILVRQFHLPKRIAKEIVARCQECKRTTTSPVRGTNPRGRFLWQMDNTHWNKTIIWVAVETNSGLVEAQVIPEETALQVALCILQLIQRYTVLHLHSDNGPCFTAHRIENLCKYLGITKTTGIPYNPQSQGVVERAHRDLKDRLAAYQGDCETVEAALSLALVSLNKKRGGIGGHTPYEIYLESEHTKYQDQLEQQFSKQKIE

SEQ ID NO: 38 - protein, 267 aa, Artificial Sequence
  chemically synthesized
NVHTSESTRKYPYPFIHRMLAHANAQTIRYSLKNNTITYFNESDVDWSSAIDYQCPDCLIGKSTKHRHIKGSRLKYQNSYEPFQYLHTDIFGPVHNLPKSAPSYFISFTDETTKFRWVYPLHDRREDSILDVFTTILAFIKNQFQASVLVIQMDRGSEYTNRTLHKFLEKNGITPCYTTTADSRAHGVAERLNRTLLDDCRTQLQCSGLPNHLWFSAIEFSTIVRNSLASPKSKKSARQHAGLAGLDISTLLPFGQPVIVNDHNPNS

SEQ ID NO: 39 - protein, 287 aa, Artificial Sequence
  chemically synthesized
KYVFIEKHQAEFSIKAMCRVLRVARSGWYTWCQRRTRISTRQQFRQHCDSVVLAAFTRSKQRYGAPRLTDELRAQGYPFNVKTVAASLRRQGLRAKASRKFSPVSYRAHGLPVSENLLEQDFYASGPNQKWAGDITYLRTDEGWLYLAVVIDLWSRAVIGWSMSPRMTAQLACDALQMALWRRKRPRNVIVHTDRGGQYCSADYQAQLKRHNLRGSMSAKGCCYDNACVESFFHSLKVECIHGEHFISREIMRATVFNYIECDYNRWRRHSWCGGLSPEQFENKNLA

SEQ ID NO: 40 - protein, 175 aa, Artificial Sequence
  chemically synthesized
VSENLLEQDFYASGPNQKWAGDITYLRTDEGWLYLAVVIDLWSRAVIGWSMSPRMTAQLACDALQMALWRRKRPRNVIVHTDRGGQYCSADYQAQLKRHNLRGSMSAKGCCYDNACVESFFHSLKVECIHGEHFISREIMRATVFNYIECDYNRWRRHSWCGGLSPEQFENKNLA

SEQ ID NO: 41 - protein, 1367 aa, Artificial Sequence
  chemically synthesized
DKKYSIGLDIGTNSVGWAVITDEYKVPSKKFKVLGNTDRHSIKKNLIGALLFDSGETAEATRLKRTARRRYTRRKNRICYLQEIFSNEMAKVDDSFFHRLEESFLVEEDKKHERHPIFGNIVDEVAYHEKYPTIYHLRKKLVDSTDKADLRLIYLALAHMIKFRGHFLIEGDLNPDNSDVDKLFIQLVQTYNQLFEENPINASGVDAKAILSARLSKSRRLENLIAQLPGEKKNGLFGNLIALSLGLTPNFKSNFDLAEDAKLQLSKDTYDDDLDNLLAQIGDQYADLFLAAKNLSDAILLSDILRVNTEITKAPLSASMIKRYDEHHQDLTLLKALVRQQLPEKYKEIFFDQSKNGYAGYIDGGASQEEFYKFIKPILEKMDGTEELLVKLNREDLLRKQRTFDNGSIPHQIHLGELHAILRRQEDFYPFLKDNREKIEKILTFRIPYYVGPLARGNSRFAWMTRKSEETITPWNFEEVVDKGASAQSFIERMTNFDKNLPNEKVLPKHSLLYEYFTVYNELTKVKYVTEGMRKPAFLSGEQKKAIVDLLFKTNRKVTVKQLKEDYFKKIECFDSVEISGVEDRFNASLGTYHDLLKIIKDKDFLDNEENEDILEDIVLTLTLFEDREMIEERLKTYAHLFDDKVMKQLKRRRYTGWGRLSRKLINGIRDKQSGKTILDFLKSDGFANRNFMQLIHDDSLTFKEDIQKAQVSGQGDSLHEHIANLAGSPAIKKGILQTVKVVDELVKVMGRHKPENIVIEMARENQTTQKGQKNSRERMKRIEEGIKELGSQILKEHPVENTQLQNEKLYLYYLQNGRDMYVDQELDINRLSDYDVDHIVPQSFLKDDSIDNKVLTRSDKNRGKSDNVPSEEVVKKMKNYWRQLLNAKLITQRKFDNLTKAERGGLSELDKAGFIKRQLVETRQITKHVAQILDSRMNTKYDENDKLIREVKVITLKSKLVSDFRKDFQFYKVREINNYHHAHDAYLNAVVGTALIKKYPKLESEFVYGDYKVYDVRKMIAKSEQEIGKATAKYFFYSNIMNFFKTEITLANGEIRKRPLIETNGETGEIVWDKGRDFATVRKVLSMPQVNIVKKTEVQTGGFSKESILPKRNSDKLIARKKDWDPKKYGGFDSPTVAYSVLVVAKVEKGKSKKLKSVKELLGITIMERSSFEKNPIDFLEAKGYKEVKKDLIIKLPKYSLFELENGRKRMLASAGELQKGNELALPSKYVNFLYLASHYEKLKGSPEDNEQKQLFVEQHKHYLDEIIEQISEFSKRVILADANLDKVLSAYNKHRDKPIREQAENIIHLFTLTNLGAPAAFKYFDTTIDRKRYTSTKEVLDATLIHQSITGLYETRIDLSQLGGD

SEQ ID NO: 42 - protein, 1367 aa, Artificial Sequence
  chemically synthesized
DKKYSIGLAIGTNSVGWAVITDEYKVPSKKFKVLGNTDRHSIKKNLIGALLFDSGETAEATRLKRTARRRYTRRKNRICYLQEIFSNEMAKVDDSFFHRLEESFLVEEDKKHERHPIFGNIVDEVAYHEKYPTIYHLRKKLVDSTDKADLRLIYLALAHMIKFRGHFLIEGDLNPDNSDVDKLFIQLVQTYNQLFEENPINASGVDAKAILSARLSKSRRLENLIAQLPGEKKNGLFGNLIALSLGLTPNFKSNFDLAEDAKLQLSKDTYDDDLDNLLAQIGDQYADLFLAAKNLSDAILLSDILRVNTEITKAPLSASMIKRYDEHHQDLTLLKALVRQQLPEKYKEIFFDQSKNGYAGYIDGGASQEEFYKFIKPILEKMDGTEELLVKLNREDLLRKQRTFDNGSIPHQIHLGELHAILRRQEDFYPFLKDNREKIEKILTFRIPYYVGPLARGNSRFAWMTRKSEETITPWNFEEVVDKGASAQSFIERMTNFDKNLPNEKVLPKHSLLYEYFTVYNELTKVKYVTEGMRKPAFLSGEQKKAIVDLLFKTNRKVTVKQLKEDYFKKIECFDSVEISGVEDRFNASLGTYHDLLKIIKDKDFLDNEENEDILEDIVLTLTLFEDREMIEERLKTYAHLFDDKVMKQLKRRRYTGWGRLSRKLINGIRDKQSGKTILDFLKSDGFANRNFMQLIHDDSLTFKEDIQKAQVSGQGDSLHEHIANLAGSPAIKKGILQTVKVVDELVKVMGRHKPENIVIEMARENQTTQKGQKNSRERMKRIEEGIKELGSQILKEHPVENTQLQNEKLYLYYLQNGRDMYVDQELDINRLSDYDVDAIVPQSFLKDDSIDNKVLTRSDKNRGKSDNVPSEEVVKKMKNYWRQLLNAKLITQRKFDNLTKAERGGLSELDKAGFIKRQLVETRQITKHVAQILDSRMNTKYDENDKLIREVKVITLKSKLVSDFRKDFQFYKVREINNYHHAHDAYLNAVVGTALIKKYPKLESEFVYGDYKVYDVRKMIAKSEQEIGKATAKYFFYSNIMNFFKTEITLANGEIRKRPLIETNGETGEIVWDKGRDFATVRKVLSMPQVNIVKKTEVQTGGFSKESILPKRNSDKLIARKKDWDPKKYGGFDSPTVAYSVLVVAKVEKGKSKKLKSVKELLGITIMERSSFEKNPIDFLEAKGYKEVKKDLIIKLPKYSLFELENGRKRMLASAGELQKGNELALPSKYVNFLYLASHYEKLKGSPEDNEQKQLFVEQHKHYLDEIIEQISEFSKRVILADANLDKVLSAYNKHRDKPIREQAENIIHLFTLTNLGAPAAFKYFDTTIDRKRYTSTKEVLDATLIHQSITGLYETRIDLSQLGGD

SEQ ID NO: 43 - protein, 1052 aa, Artificial Sequence
  chemically synthesized
KRNYILGLDIGITSVGYGIIDYETRDVIDAGVRLFKEANVENNEGRRSKRGARRLKRRRRHRIQRVKKLLFDYNLLTDHSELSGINPYEARVKGLSQKLSEEEFSAALLHLAKRRGVHNVNEVEEDTGNELSTKEQISRNSKALEEKYVAELQLERLKKDGEVRGSINRFKTSDYVKEAKQLLKVQKAYHQLDQSFIDTYIDLLETRRTYYEGPGEGSPFGWKDIKEWYEMLMGHCTYFPEELRSVKYAYNADLYNALNDLNNLVITRDENEKLEYYEKFQIIENVFKQKKKPTLKQIAKEILVNEEDIKGYRVTSTGKPEFTNLKVYHDIKDITARKEIIENAELLDQIAKILTIYQSSEDIQEELTNLNSELTQEEIEQISNLKGYTGTHNLSLKAINLILDELWHTNDNQIAIFNRLKLVPKKVDLSQQKEIPTTLVDDFILSPVVKRSFIQSIKVINAIIKKYGLPNDIIIELAREKNSKDAQKMINEMQKRNRQTNERIEEIIRTTGKENAKYLIEKIKLHDMQEGKCLYSLEAIPLEDLLNNPFNYEVDHIIPRSVSFDNSFNNKVLVKQEENSKKGNRTPFQYLSSSDSKISYETFKKHILNLAKGKGRISKTKKEYLLEERDINRFSVQKDFINRNLVDTRYATRGLMNLLRSYFRVNNLDVKVKSINGGFTSFLRRKWKFKKERNKGYKHHAEDALIIANADFIFKEWKKLDKAKKVMENQMFEEKQAESMPEIETEQEYKEIFITPHQIKHIKDFKDYKYSHRVDKKPNRELINDTLYSTRKDDKGNTLIVNNLNGLYDKDNDKLKKLINKSPEKLLMYHHDPQTYQKLKLIMEQYGDEKNPLYKYYEETGNYLTKYSKKDNGPVIKKIKYYGNKLNAHLDITDDYPNSRNKVVKLSLKPYRFDVYLDNGVYKFVTVKNLDVIKKENYYEVNSKCYEEAKKLKKISNQAEFIASFYNNDLIKINGELYRVIGVNNDLLNRIEVNMIDITYREYLENMNDKRPPRIIKTIASKTQSIKKYSTDILGNLYEVKSKKHPQIIKKG

SEQ ID NO: 44 - protein, 1052 aa, Artificial Sequence
  chemically synthesized
KRNYILGLAIGITSVGYGIIDYETRDVIDAGVRLFKEANVENNEGRRSKRGARRLKRRRRHRIQRVKKLLFDYNLLTDHSELSGINPYEARVKGLSQKLSEEEFSAALLHLAKRRGVHNVNEVEEDTGNELSTKEQISRNSKALEEKYVAELQLERLKKDGEVRGSINRFKTSDYVKEAKQLLKVQKAYHQLDQSFIDTYIDLLETRRTYYEGPGEGSPFGWKDIKEWYEMLMGHCTYFPEELRSVKYAYNADLYNALNDLNNLVITRDENEKLEYYEKFQIIENVFKQKKKPTLKQIAKEILVNEEDIKGYRVTSTGKPEFTNLKVYHDIKDITARKEIIENAELLDQIAKILTIYQSSEDIQEELTNLNSELTQEEIEQISNLKGYTGTHNLSLKAINLILDELWHTNDNQIAIFNRLKLVPKKVDLSQQKEIPTTLVDDFILSPVVKRSFIQSIKVINAIIKKYGLPNDIIIELAREKNSKDAQKMINEMQKRNRQTNERIEEIIRTTGKENAKYLIEKIKLHDMQEGKCLYSLEAIPLEDLLNNPFNYEVDHIIPRSVSFDNSFNNKVLVKQEEASKKGNRTPFQYLSSSDSKISYETFKKHILNLAKGKGRISKTKKEYLLEERDINRFSVQKDFINRNLVDTRYATRGLMNLLRSYFRVNNLDVKVKSINGGFTSFLRRKWKFKKERNKGYKHHAEDALIIANADFIFKEWKKLDKAKKVMENQMFEEKQAESMPEIETEQEYKEIFITPHQIKHIKDFKDYKYSHRVDKKPNRELINDTLYSTRKDDKGNTLIVNNLNGLYDKDNDKLKKLINKSPEKLLMYHHDPQTYQKLKLIMEQYGDEKNPLYKYYEETGNYLTKYSKKDNGPVIKKIKYYGNKLNAHLDITDDYPNSRNKVVKLSLKPYRFDVYLDNGVYKFVTVKNLDVIKKENYYEVNSKCYEEAKKLKKISNQAEFIASFYNNDLIKINGELYRVIGVNNDLLNRIEVNMIDITYREYLENMNDKRPPRIIKTIASKTQSIKKYSTDILGNLYEVKSKKHPQIIKKG

SEQ ID NO: 45 - protein, 1227 aa, Artificial Sequence
  chemically synthesized
SKLEKFTNCYSLSKTLRFKAIPVGKTQENIDNKRLLVEDEKRAEDYKGVKKLLDRYYLSFINDVLHSIKLKNLNNYISLFRKKTRTEKENKELENLEINLRKEIAKAFKGNEGYKSLFKKDIIETILPEFLDDKDEIALVNSFNGFTTAFTGFFDNRENMFSEEAKSTSIAFRCINENLTRYISNMDIFEKVDAIFDKHEVQEIKEKILNSDYDVEDFFEGEFFNFVLTQEGIDVYNAIIGGFVTESGEKIKGLNEYINLYNQKTKQKLPKFKPLYKQVLSDRESLSFYGEGYTSDEEVLEVFRNTLNKNSEIFSSIKKLEKLFKNFDEYSSAGIFVKNGPAISTISKDIFGEWNVIRDKWNAEYDDIHLKKKAVVTEKYEDDRRKSFKKIGSFSLEQLQEYADADLSVVEKLKEIIIQKVDEIYKVYGSSEKLFDADFVLEKSLKKNDAVVAIMKDLLDSVKSFENYIKAFFGEGKETNRDESFYGDFVLAYDILLKVDHIYDAIRNYVTQKPYSKDKFKLYFQNPQFMGGWDKDKETDYRATILRYGSKYYLAIMDKKYAKCLQKIDKDDVNGNYEKINYKLLPGPNKMLPKVFFSKKWMAYYNPSEDIQKIYKNGTFKKGDMFNLNDCHKLIDFFKDSISRYPKWSNAYDFNFSETEKYKDIAGFYREVEEQGYKVSFESASKKEVDKLVEEGKLYMFQIYNKDFSDKSHGTPNLHTMYFKLLFDENNHGQIRLSGGAELFMRRASLKKEELVVHPANSPIANKNPDNPKKTTTLSYDVYKDKRFSEDQYELHIPIAINKCPKNIFKINTEVRVLLKHDDNPYVIGIDRGERNLLYIVVVDGKGNIVEQYSLNEIINNFNGIRIKTDYHSLLDKKEKERFEARQNWTSIENIKELKAGYISQVVHKICELVEKYDAVIALEDLNSGFKNSRVKVEKQVYQKFEKMLIDKLNYMVDKKSNPCATGGALKGYQITNKFESFKSMSTQNGFIFYIPAWLTSKIDPSTGFVNLLKTKYTSIADSKKFISSFDRIMYVPEEDLFEFALDYKNFSRTDADYIKKWKLYSYGNRIRIFRNPKKNNVFDWEEVCLTSAYKELFNKYGINYQQGDIRALLCEQSDKAFYSSFMALMSLMLQMRNSITGRTDVDFLISPVKNSDGIFYDSRNYEAQENAILPKNADANGAYNIARKVLWAIGQFKKAEDEKLDKVKIAISNKEWLEYAQTSVKH

SEQ ID NO: 46 - protein, 1227 aa, Artificial Sequence
  chemically synthesized
SKLEKFTNCYSLSKTLRFKAIPVGKTQENIDNKRLLVEDEKRAEDYKGVKKLLDRYYLSFINDVLHSIKLKNLNNYISLFRKKTRTEKENKELENLEINLRKEIAKAFKGNEGYKSLFKKDIIETILPEFLDDKDEIALVNSFNGFTTAFTGFFDNRENMFSEEAKSTSIAFRCINENLTRYISNMDIFEKVDAIFDKHEVQEIKEKILNSDYDVEDFFEGEFFNFVLTQEGIDVYNAIIGGFVTESGEKIKGLNEYINLYNQKTKQKLPKFKPLYKQVLSDRESLSFYGEGYTSDEEVLEVFRNTLNKNSEIFSSIKKLEKLFKNFDEYSSAGIFVKNGPAISTISKDIFGEWNVIRDKWNAEYDDIHLKKKAVVTEKYEDDRRKSFKKIGSFSLEQLQEYADADLSVVEKLKEIIIQKVDEIYKVYGSSEKLFDADFVLEKSLKKNDAVVAIMKDLLDSVKSFENYIKAFFGEGKETNRDESFYGDFVLAYDILLKVDHIYDAIRNYVTQKPYSKDKFKLYFQNPQFMGGWDKDKETDYRATILRYGSKYYLAIMDKKYAKCLQKIDKDDVNGNYEKINYKLLPGPNKMLPKVFFSKKWMAYYNPSEDIQKIYKNGTFKKGDMFNLNDCHKLIDFFKDSISRYPKWSNAYDFNFSETEKYKDIAGFYREVEEQGYKVSFESASKKEVDKLVEEGKLYMFQIYNKDFSDKSHGTPNLHTMYFKLLFDENNHGQIRLSGGAELFMRRASLKKEELVVHPANSPIANKNPDNPKKTTTLSYDVYKDKRFSEDQYELHIPIAINKCPKNIFKINTEVRVLLKHDDNPYVIGIARGERNLLYIVVVDGKGNIVEQYSLNEIINNFNGIRIKTDYHSLLDKKEKERFEARQNWTSIENIKELKAGYISQVVHKICELVEKYDAVIALEDLNSGFKNSRVKVEKQVYQKFEKMLIDKLNYMVDKKSNPCATGGALKGYQITNKFESFKSMSTQNGFIFYIPAWLTSKIDPSTGFVNLLKTKYTSIADSKKFISSFDRIMYVPEEDLFEFALDYKNFSRTDADYIKKWKLYSYGNRIRIFRNPKKNNVFDWEEVCLTSAYKELFNKYGINYQQGDIRALLCEQSDKAFYSSFMALMSLMLQMRNSITGRTDVDFLISPVKNSDGIFYDSRNYEAQENAILPKNADANGAYNIARKVLWAIGQFKKAEDEKLDKVKIAISNKEWLEYAQTSVKH

SEQ ID NO: 47 - protein, 9 aa, Artificial Sequence
  chemically synthesized
PKKKRKVSS

SEQ ID NO: 48 - protein, 24 aa, Artificial Sequence
  chemically synthesized
DPKKKRKVDPKKKRKVDPKKKRKV

SEQ ID NO: 49 - protein, 22 aa, Artificial Sequence
  chemically synthesized
DYKDHDGDYKDHDIDYKDDDDK

SEQ ID NO: 50 - protein, 16 aa, Artificial Sequence
  chemically synthesized
KRPAATKKAGQAKKKK

SEQ ID NO: 51 - protein, 39 aa, Artificial Sequence
  chemically synthesized
NSKKRSLEDNETEIKVSRDTWNTKNMRSLEPPRSKKRIH

SEQ ID NO: 52 - protein, 31 aa, Artificial Sequence
  chemically synthesized
PKKKRKVSSDYKDHDGDYKDHDIDYKDDDDK

SEQ ID NO: 53 - protein, 50 aa, Artificial Sequence
  chemically synthesized
GSDPKKKRKVDPKKKRKVDPKKKRKVLEDYKDHDGDYKDHDIDYKDDDDK

SEQ ID NO: 54 - protein, 40 aa, Artificial Sequence
  chemically synthesized
KRPAATKKAGQAKKKKLEDYKDHDGDYKDHDIDYKDDDDK

SEQ ID NO: 55 - protein, 67 aa, Artificial Sequence
  chemically synthesized
GSKRPAATKKAGQAKKKKVDPKKKRKVDPKKKRKVDPKKKRKVLEDYKDHDGDYKDHDIDYKDDDDK

SEQ ID NO: 56 - protein, 63 aa, Artificial Sequence
  chemically synthesized
NSKKRSLEDNETEIKVSRDTWNTKNMRSLEPPRSKKRIHLEDYKDHDGDYKDHDIDYKDDDDK

SEQ ID NO: 57 - protein, 1719 aa, Artificial Sequence
  chemically synthesized
MPKKKRKVSSFLDGIDKAQDEHEKYHSNWRAMASDFNLPPVVAKEIVASCDKCQLKGEAMHGQVDCSPGIWQLDCTHLEGKVILVAVHVASGYIEAEVIPAETGQETAYFLLKLAGRWPVKTIHTDNGSNFTGATVRAACWWAGIKQEFGIPYNPQSQGVVESMNKELKKIIGQVRDQAEHLKTAVQMAVFIHNFKRKGGIGGYSAGERIVDIIATDIQTKELQKQITKIQNFRVYYRDSRNPLWKGPAKLLWKGEGAVVIQDNSDIKVVPRRKAKIIRDYGKQMAGDDCVASRQDEDGGGGSGGGGSGGGGSDKKYSIGLAIGTNSVGWAVITDEYKVPSKKFKVLGNTDRHSIKKNLIGALLFDSGETAEATRLKRTARRRYTRRKNRICYLQEIFSNEMAKVDDSFFHRLEESFLVEEDKKHERHPIFGNIVDEVAYHEKYPTIYHLRKKLVDSTDKADLRLIYLALAHMIKFRGHFLIEGDLNPDNSDVDKLFIQLVQTYNQLFEENPINASGVDAKAILSARLSKSRRLENLIAQLPGEKKNGLFGNLIALSLGLTPNFKSNFDLAEDAKLQLSKDTYDDDLDNLLAQIGDQYADLFLAAKNLSDAILLSDILRVNTEITKAPLSASMIKRYDEHHQDLTLLKALVRQQLPEKYKEIFFDQSKNGYAGYIDGGASQEEFYKFIKPILEKMDGTEELLVKLNREDLLRKQRTFDNGSIPHQIHLGELHAILRRQEDFYPFLKDNREKIEKILTFRIPYYVGPLARGNSRFAWMTRKSEETITPWNFEEVVDKGASAQSFIERMTNFDKNLPNEKVLPKHSLLYEYFTVYNELTKVKYVTEGMRKPAFLSGEQKKAIVDLLFKTNRKVTVKQLKEDYFKKIECFDSVEISGVEDRFNASLGTYHDLLKIIKDKDFLDNEENEDILEDIVLTLTLFEDREMIEERLKTYAHLFDDKVMKQLKRRRYTGWGRLSRKLINGIRDKQSGKTILDFLKSDGFANRNFMQLIHDDSLTFKEDIQKAQVSGQGDSLHEHIANLAGSPAIKKGILQTVKVVDELVKVMGRHKPENIVIEMARENQTTQKGQKNSRERMKRIEEGIKELGSQILKEHPVENTQLQNEKLYLYYLQNGRDMYVDQELDINRLSDYDVDAIVPQSFLKDDSIDNKVLTRSDKNRGKSDNVPSEEVVKKMKNYWRQLLNAKLITQRKFDNLTKAERGGLSELDKAGFIKRQLVETRQITKHVAQILDSRMNTKYDENDKLIREVKVITLKSKLVSDFRKDFQFYKVREINNYHHAHDAYLNAVVGTALIKKYPKLESEFVYGDYKVYDVRKMIAKSEQEIGKATAKYFFYSNIMNFFKTEITLANGEIRKRPLIETNGETGEIVWDKGRDFATVRKVLSMPQVNIVKKTEVQTGGFSKESILPKRNSDKLIARKKDWDPKKYGGFDSPTVAYSVLVVAKVEKGKSKKLKSVKELLGITIMERSSFEKNPIDFLEAKGYKEVKKDLIIKLPKYSLFELENGRKRMLASAGELQKGNELALPSKYVNFLYLASHYEKLKGSPEDNEQKQLFVEQHKHYLDEIIEQISEFSKRVILADANLDKVLSAYNKHRDKPIREQAENIIHLFTLTNLGAPAAFKYFDTTIDRKRYTSTKEVLDATLIHQSITGLYETRIDLSQLGGDNSKKRSLEDNETEIKVSRDTWNTKNMRSLEPPRSKKRIH

SEQ ID NO: 58 - protein, 1653 aa, Artificial Sequence
  chemically synthesized
MPKKKRKVSSFLDGIDKAQDEHEKYHSNWRAMASDFNLPPVVAKEIVASCDKCQLKGEAMHGQVDCSPGIWQLDCTHLEGKVILVAVHVASGYIEAEVIPAETGQETAYFLLKLAGRWPVKTIHTDNGSNFTGATVRAACWWAGIKQEFGIPYNPQSQGVVESMNKELKKIIGQVRDQAEHLKTAVQMAVFIHNFKRKGGIGGYSAGERIVDIIATDIQTKELQKQITKIQNGGGGSGGGGSGGGGSDKKYSIGLAIGTNSVGWAVITDEYKVPSKKFKVLGNTDRHSIKKNLIGALLFDSGETAEATRLKRTARRRYTRRKNRICYLQEIFSNEMAKVDDSFFHRLEESFLVEEDKKHERHPIFGNIVDEVAYHEKYPTIYHLRKKLVDSTDKADLRLIYLALAHMIKFRGHFLIEGDLNPDNSDVDKLFIQLVQTYNQLFEENPINASGVDAKAILSARLSKSRRLENLIAQLPGEKKNGLFGNLIALSLGLTPNFKSNFDLAEDAKLQLSKDTYDDDLDNLLAQIGDQYADLFLAAKNLSDAILLSDILRVNTEITKAPLSASMIKRYDEHHQDLTLLKALVRQQLPEKYKEIFFDQSKNGYAGYIDGGASQEEFYKFIKPILEKMDGTEELLVKLNREDLLRKQRTFDNGSIPHQIHLGELHAILRRQEDFYPFLKDNREKIEKILTFRIPYYVGPLARGNSRFAWMTRKSEETITPWNFEEVVDKGASAQSFIERMTNFDKNLPNEKVLPKHSLLYEYFTVYNELTKVKYVTEGMRKPAFLSGEQKKAIVDLLFKTNRKVTVKQLKEDYFKKIECFDSVEISGVEDRFNASLGTYHDLLKIIKDKDFLDNEENEDILEDIVLTLTLFEDREMIEERLKTYAHLFDDKVMKQLKRRRYTGWGRLSRKLINGIRDKQSGKTILDFLKSDGFANRNFMQLIHDDSLTFKEDIQKAQVSGQGDSLHEHIANLAGSPAIKKGILQTVKVVDELVKVMGRHKPENIVIEMARENQTTQKGQKNSRERMKRIEEGIKELGSQILKEHPVENTQLQNEKLYLYYLQNGRDMYVDQELDINRLSDYDVDAIVPQSFLKDDSIDNKVLTRSDKNRGKSDNVPSEEVVKKMKNYWRQLLNAKLITQRKFDNLTKAERGGLSELDKAGFIKRQLVETRQITKHVAQILDSRMNTKYDENDKLIREVKVITLKSKLVSDFRKDFQFYKVREINNYHHAHDAYLNAVVGTALIKKYPKLESEFVYGDYKVYDVRKMIAKSEQEIGKATAKYFFYSNIMNFFKTEITLANGEIRKRPLIETNGETGEIVWDKGRDFATVRKVLSMPQVNIVKKTEVQTGGFSKESILPKRNSDKLIARKKDWDPKKYGGFDSPTVAYSVLVVAKVEKGKSKKLKSVKELLGITIMERSSFEKNPIDFLEAKGYKEVKKDLIIKLPKYSLFELENGRKRMLASAGELQKGNELALPSKYVNFLYLASHYEKLKGSPEDNEQKQLFVEQHKHYLDEIIEQISEFSKRVILADANLDKVLSAYNKHRDKPIREQAENIIHLFTLTNLGAPAAFKYFDTTIDRKRYTSTKEVLDATLIHQSITGLYETRIDLSQLGGDNSKKRSLEDNETEIKVSRDTWNTKNMRSLEPPRSKKRIH

SEQ ID NO: 59 - protein, 1890 aa, Artificial Sequence
  chemically synthesized
MPKKKRKVSSFLDGIDKAQDEHEKYHSNWRAMASDFNLPPVVAKEIVASCDKCQLKGEAMHGQVDCSPGIWQLDCTHLEGKVILVAVHVASGYIEAEVIPAETGQETAYFLLKLAGRWPVKTIHTDNGSNFTGATVRAACWWAGIKQEFGIPYNPQSQGVVESMNKELKKIIGQVRDQAEHLKTAVQMAVFIHNFKRKGGIGGYSAGERIVDIIATDIQTKELQKQITKIQNGGGGSGGGGSGGGGSFLDGIDKAQDEHEKYHSNWRAMASDFNLPPVVAKEIVASCDKCQLKGEAMHGQVDCSPGIWQLDCTHLEGKVILVAVHVASGYIEAEVIPAETGQETAYFLLKLAGRWPVKTIHTDNGSNFTGATVRAACWWAGIKQEFGIPYNPQSQGVVESMNKELKKIIGQVRDQAEHLKTAVQMAVFIHNFKRKGGIGGYSAGERIVDIIATDIQTKELQKQITKIQNGGGGSGGGGSGGGGSDKKYSIGLAIGTNSVGWAVITDEYKVPSKKFKVLGNTDRHSIKKNLIGALLFDSGETAEATRLKRTARRRYTRRKNRICYLQEIFSNEMAKVDDSFFHRLEESFLVEEDKKHERHPIFGNIVDEVAYHEKYPTIYHLRKKLVDSTDKADLRLIYLALAHMIKFRGHFLIEGDLNPDNSDVDKLFIQLVQTYNQLFEENPINASGVDAKAILSARLSKSRRLENLIAQLPGEKKNGLFGNLIALSLGLTPNFKSNFDLAEDAKLQLSKDTYDDDLDNLLAQIGDQYADLFLAAKNLSDAILLSDILRVNTEITKAPLSASMIKRYDEHHQDLTLLKALVRQQLPEKYKEIFFDQSKNGYAGYIDGGASQEEFYKFIKPILEKMDGTEELLVKLNREDLLRKQRTFDNGSIPHQIHLGELHAILRRQEDFYPFLKDNREKIEKILTFRIPYYVGPLARGNSRFAWMTRKSEETITPWNFEEVVDKGASAQSFIERMTNFDKNLPNEKVLPKHSLLYEYFTVYNELTKVKYVTEGMRKPAFLSGEQKKAIVDLLFKTNRKVTVKQLKEDYFKKIECFDSVEISGVEDRFNASLGTYHDLLKIIKDKDFLDNEENEDILEDIVLTLTLFEDREMIEERLKTYAHLFDDKVMKQLKRRRYTGWGRLSRKLINGIRDKQSGKTILDFLKSDGFANRNFMQLIHDDSLTFKEDIQKAQVSGQGDSLHEHIANLAGSPAIKKGILQTVKVVDELVKVMGRHKPENIVIEMARENQTTQKGQKNSRERMKRIEEGIKELGSQILKEHPVENTQLQNEKLYLYYLQNGRDMYVDQELDINRLSDYDVDAIVPQSFLKDDSIDNKVLTRSDKNRGKSDNVPSEEVVKKMKNYWRQLLNAKLITQRKFDNLTKAERGGLSELDKAGFIKRQLVETRQITKHVAQILDSRMNTKYDENDKLIREVKVITLKSKLVSDFRKDFQFYKVREINNYHHAHDAYLNAVVGTALIKKYPKLESEFVYGDYKVYDVRKMIAKSEQEIGKATAKYFFYSNIMNFFKTEITLANGEIRKRPLIETNGETGEIVWDKGRDFATVRKVLSMPQVNIVKKTEVQTGGFSKESILPKRNSDKLIARKKDWDPKKYGGFDSPTVAYSVLVVAKVEKGKSKKLKSVKELLGITIMERSSFEKNPIDFLEAKGYKEVKKDLIIKLPKYSLFELENGRKRMLASAGELQKGNELALPSKYVNFLYLASHYEKLKGSPEDNEQKQLFVEQHKHYLDEIIEQISEFSKRVILADANLDKVLSAYNKHRDKPIREQAENIIHLFTLTNLGAPAAFKYFDTTIDRKRYTSTKEVLDATLIHQSITGLYETRIDLSQLGGDNSKKRSLEDNETEIKVSRDTWNTKNMRSLEPPRSKKRIH

SEQ ID NO: 60 - protein, 1719 aa, Artificial Sequence
  chemically synthesized
MPKKKRKVSSFLDGIDKAQDEHEKYHSNWRAMASDFNLPPVVAKEIVASCDKCQLKGEAMHGQVDCSPGIWQLDCTHLEGKVILVAVHVASGYIGAEVIPAETGQETAYFLLKLAGRWPVKTIHTDNGSNFTGATVRAACWWAGIKQEFGIPYNPQSQGVVESMNKELKKIIGQVRDQAEHLKTAVQMAVFIHNFKRKGGIGGYSAGERIVDIIATDIQTKELQKQITKIQNFRVYYRDSRNPLWKGPAKLLWKGEGAVVIQDNSDIKVVPRRKAKIIRDYGKQMAGDDCVASRQDEDGGGGSGGGGSGGGGSDKKYSIGLAIGTNSVGWAVITDEYKVPSKKFKVLGNTDRHSIKKNLIGALLFDSGETAEATRLKRTARRRYTRRKNRICYLQEIFSNEMAKVDDSFFHRLEESFLVEEDKKHERHPIFGNIVDEVAYHEKYPTIYHLRKKLVDSTDKADLRLIYLALAHMIKFRGHFLIEGDLNPDNSDVDKLFIQLVQTYNQLFEENPINASGVDAKAILSARLSKSRRLENLIAQLPGEKKNGLFGNLIALSLGLTPNFKSNFDLAEDAKLQLSKDTYDDDLDNLLAQIGDQYADLFLAAKNLSDAILLSDILRVNTEITKAPLSASMIKRYDEHHQDLTLLKALVRQQLPEKYKEIFFDQSKNGYAGYIDGGASQEEFYKFIKPILEKMDGTEELLVKLNREDLLRKQRTFDNGSIPHQIHLGELHAILRRQEDFYPFLKDNREKIEKILTFRIPYYVGPLARGNSRFAWMTRKSEETITPWNFEEVVDKGASAQSFIERMTNFDKNLPNEKVLPKHSLLYEYFTVYNELTKVKYVTEGMRKPAFLSGEQKKAIVDLLFKTNRKVTVKQLKEDYFKKIECFDSVEISGVEDRFNASLGTYHDLLKIIKDKDFLDNEENEDILEDIVLTLTLFEDREMIEERLKTYAHLFDDKVMKQLKRRRYTGWGRLSRKLINGIRDKQSGKTILDFLKSDGFANRNFMQLIHDDSLTFKEDIQKAQVSGQGDSLHEHIANLAGSPAIKKGILQTVKVVDELVKVMGRHKPENIVIEMARENQTTQKGQKNSRERMKRIEEGIKELGSQILKEHPVENTQLQNEKLYLYYLQNGRDMYVDQELDINRLSDYDVDAIVPQSFLKDDSIDNKVLTRSDKNRGKSDNVPSEEVVKKMKNYWRQLLNAKLITQRKFDNLTKAERGGLSELDKAGFIKRQLVETRQITKHVAQILDSRMNTKYDENDKLIREVKVITLKSKLVSDFRKDFQFYKVREINNYHHAHDAYLNAVVGTALIKKYPKLESEFVYGDYKVYDVRKMIAKSEQEIGKATAKYFFYSNIMNFFKTEITLANGEIRKRPLIETNGETGEIVWDKGRDFATVRKVLSMPQVNIVKKTEVQTGGFSKESILPKRNSDKLIARKKDWDPKKYGGFDSPTVAYSVLVVAKVEKGKSKKLKSVKELLGITIMERSSFEKNPIDFLEAKGYKEVKKDLIIKLPKYSLFELENGRKRMLASAGELQKGNELALPSKYVNFLYLASHYEKLKGSPEDNEQKQLFVEQHKHYLDEIIEQISEFSKRVILADANLDKVLSAYNKHRDKPIREQAENIIHLFTLTNLGAPAAFKYFDTTIDRKRYTSTKEVLDATLIHQSITGLYETRIDLSQLGGDNSKKRSLEDNETEIKVSRDTWNTKNMRSLEPPRSKKRIH

SEQ ID NO: 61 - protein, 1653 aa, Artificial Sequence
  chemically synthesized
MPKKKRKVSSFLDGIDKAQDEHEKYHSNWRAMASDFNLPPVVAKEIVASCDKCQLKGEAMHGQVDCSPGIWQLDCTHLEGKVILVAVHVASGYIGAEVIPAETGQETAYFLLKLAGRWPVKTIHTDNGSNFTGATVRAACWWAGIKQEFGIPYNPQSQGVVESMNKELKKIIGQVRDQAEHLKTAVQMAVFIHNFKRKGGIGGYSAGERIVDIIATDIQTKELQKQITKIQNGGGGSGGGGSGGGGSDKKYSIGLAIGTNSVGWAVITDEYKVPSKKFKVLGNTDRHSIKKNLIGALLFDSGETAEATRLKRTARRRYTRRKNRICYLQEIFSNEMAKVDDSFFHRLEESFLVEEDKKHERHPIFGNIVDEVAYHEKYPTIYHLRKKLVDSTDKADLRLIYLALAHMIKFRGHFLIEGDLNPDNSDVDKLFIQLVQTYNQLFEENPINASGVDAKAILSARLSKSRRLENLIAQLPGEKKNGLFGNLIALSLGLTPNFKSNFDLAEDAKLQLSKDTYDDDLDNLLAQIGDQYADLFLAAKNLSDAILLSDILRVNTEITKAPLSASMIKRYDEHHQDLTLLKALVRQQLPEKYKEIFFDQSKNGYAGYIDGGASQEEFYKFIKPILEKMDGTEELLVKLNREDLLRKQRTFDNGSIPHQIHLGELHAILRRQEDFYPFLKDNREKIEKILTFRIPYYVGPLARGNSRFAWMTRKSEETITPWNFEEVVDKGASAQSFIERMTNFDKNLPNEKVLPKHSLLYEYFTVYNELTKVKYVTEGMRKPAFLSGEQKKAIVDLLFKTNRKVTVKQLKEDYFKKIECFDSVEISGVEDRFNASLGTYHDLLKIIKDKDFLDNEENEDILEDIVLTLTLFEDREMIEERLKTYAHLFDDKVMKQLKRRRYTGWGRLSRKLINGIRDKQSGKTILDFLKSDGFANRNFMQLIHDDSLTFKEDIQKAQVSGQGDSLHEHIANLAGSPAIKKGILQTVKVVDELVKVMGRHKPENIVIEMARENQTTQKGQKNSRERMKRIEEGIKELGSQILKEHPVENTQLQNEKLYLYYLQNGRDMYVDQELDINRLSDYDVDAIVPQSFLKDDSIDNKVLTRSDKNRGKSDNVPSEEVVKKMKNYWRQLLNAKLITQRKFDNLTKAERGGLSELDKAGFIKRQLVETRQITKHVAQILDSRMNTKYDENDKLIREVKVITLKSKLVSDFRKDFQFYKVREINNYHHAHDAYLNAVVGTALIKKYPKLESEFVYGDYKVYDVRKMIAKSEQEIGKATAKYFFYSNIMNFFKTEITLANGEIRKRPLIETNGETGEIVWDKGRDFATVRKVLSMPQVNIVKKTEVQTGGFSKESILPKRNSDKLIARKKDWDPKKYGGFDSPTVAYSVLVVAKVEKGKSKKLKSVKELLGITIMERSSFEKNPIDFLEAKGYKEVKKDLIIKLPKYSLFELENGRKRMLASAGELQKGNELALPSKYVNFLYLASHYEKLKGSPEDNEQKQLFVEQHKHYLDEIIEQISEFSKRVILADANLDKVLSAYNKHRDKPIREQAENIIHLFTLTNLGAPAAFKYFDTTIDRKRYTSTKEVLDATLIHQSITGLYETRIDLSQLGGDNSKKRSLEDNETEIKVSRDTWNTKNMRSLEPPRSKKRIH

SEQ ID NO: 62 - protein, 1719 aa, Artificial Sequence
  chemically synthesized
MPKKKRKVSSFLDGIDKAQDEHEKYHSNWRAMASDFNLPPVVAKEIVASCDKCQLKGEAMHGQVDCSPGIWQLDCTHLEGKVILVAVHVASGYIFAEVIPAETGQETAYFLLKLAGRWPVKTIHTDNGSNFTGATVRAACWWAGIKQEFGIPYNPQSQGVVESMNKELKKIIGQVRDQAEHLKTAVQMAVFIHNFKRKGGIGGYSAGERIVDIIATDIQTKELQKQITKIQNFRVYYRDSRNPLWKGPAKLLWKGEGAVVIQDNSDIKVVPRRKAKIIRDYGKQMAGDDCVASRQDEDGGGGSGGGGSGGGGSDKKYSIGLAIGTNSVGWAVITDEYKVPSKKFKVLGNTDRHSIKKNLIGALLFDSGETAEATRLKRTARRRYTRRKNRICYLQEIFSNEMAKVDDSFFHRLEESFLVEEDKKHERHPIFGNIVDEVAYHEKYPTIYHLRKKLVDSTDKADLRLIYLALAHMIKFRGHFLIEGDLNPDNSDVDKLFIQLVQTYNQLFEENPINASGVDAKAILSARLSKSRRLENLIAQLPGEKKNGLFGNLIALSLGLTPNFKSNFDLAEDAKLQLSKDTYDDDLDNLLAQIGDQYADLFLAAKNLSDAILLSDILRVNTEITKAPLSASMIKRYDEHHQDLTLLKALVRQQLPEKYKEIFFDQSKNGYAGYIDGGASQEEFYKFIKPILEKMDGTEELLVKLNREDLLRKQRTFDNGSIPHQIHLGELHAILRRQEDFYPFLKDNREKIEKILTFRIPYYVGPLARGNSRFAWMTRKSEETITPWNFEEVVDKGASAQSFIERMTNFDKNLPNEKVLPKHSLLYEYFTVYNELTKVKYVTEGMRKPAFLSGEQKKAIVDLLFKTNRKVTVKQLKEDYFKKIECFDSVEISGVEDRFNASLGTYHDLLKIIKDKDFLDNEENEDILEDIVLTLTLFEDREMIEERLKTYAHLFDDKVMKQLKRRRYTGWGRLSRKLINGIRDKQSGKTILDFLKSDGFANRNFMQLIHDDSLTFKEDIQKAQVSGQGDSLHEHIANLAGSPAIKKGILQTVKVVDELVKVMGRHKPENIVIEMARENQTTQKGQKNSRERMKRIEEGIKELGSQILKEHPVENTQLQNEKLYLYYLQNGRDMYVDQELDINRLSDYDVDAIVPQSFLKDDSIDNKVLTRSDKNRGKSDNVPSEEVVKKMKNYWRQLLNAKLITQRKFDNLTKAERGGLSELDKAGFIKRQLVETRQITKHVAQILDSRMNTKYDENDKLIREVKVITLKSKLVSDFRKDFQFYKVREINNYHHAHDAYLNAVVGTALIKKYPKLESEFVYGDYKVYDVRKMIAKSEQEIGKATAKYFFYSNIMNFFKTEITLANGEIRKRPLIETNGETGEIVWDKGRDFATVRKVLSMPQVNIVKKTEVQTGGFSKESILPKRNSDKLIARKKDWDPKKYGGFDSPTVAYSVLVVAKVEKGKSKKLKSVKELLGITIMERSSFEKNPIDFLEAKGYKEVKKDLIIKLPKYSLFELENGRKRMLASAGELQKGNELALPSKYVNFLYLASHYEKLKGSPEDNEQKQLFVEQHKHYLDEIIEQISEFSKRVILADANLDKVLSAYNKHRDKPIREQAENIIHLFTLTNLGAPAAFKYFDTTIDRKRYTSTKEVLDATLIHQSITGLYETRIDLSQLGGDNSKKRSLEDNETEIKVSRDTWNTKNMRSLEPPRSKKRIH

SEQ ID NO: 63 - protein, 1652 aa, Artificial Sequence
  chemically synthesized
MPKKKRKVSSFLDGIDKAQDEHEKYHSNWRAMASDFNLPPVVAKEIVASCDKCQLKGEAMHGQVDCSPGIWQLDCTHLEGKVILVAVHVASGYIFAEVIPAETGQETAYFLLKLAGRWPVKTIHTDNGSNFTGATVRAACWWAGIKQEFGIPYNPQSQGVVESMNKELKKIIGQVRDQAEHLKTAVQMAVFIHNFKRKGGIGGYSAGERIVDIIATDIQTKELQKQTKIQNGGGGSGGGGSGGGGSDKKYSIGLAIGTNSVGWAVITDEYKVPSKKFKVLGNTDRHSIKKNLIGALLFDSGETAEATRLKRTARRRYTRRKNRICYLQEIFSNEMAKVDDSFFHRLEESFLVEEDKKHERHPIFGNIVDEVAYHEKYPTIYHLRKKLVDSTDKADLRLIYLALAHMIKFRGHFLIEGDLNPDNSDVDKLFIQLVQTYNQLFEENPINASGVDAKAILSARLSKSRRLENLIAQLPGEKKNGLFGNLIALSLGLTPNFKSNFDLAEDAKLQLSKDTYDDDLDNLLAQIGDQYADLFLAAKNLSDAILLSDILRVNTEITKAPLSASMIKRYDEHHQDLTLLKALVRQQLPEKYKEIFFDQSKNGYAGYIDGGASQEEFYKFIKPILEKMDGTEELLVKLNREDLLRKQRTFDNGSIPHQIHLGELHAILRRQEDFYPFLKDNREKIEKILTFRIPYYVGPLARGNSRFAWMTRKSEETITPWNFEEVVDKGASAQSFIERMTNFDKNLPNEKVLPKHSLLYEYFTVYNELTKVKYVTEGMRKPAFLSGEQKKAIVDLLFKTNRKVTVKQLKEDYFKKIECFDSVEISGVEDRFNASLGTYHDLLKIIKDKDFLDNEENEDILEDIVLTLTLFEDREMIEERLKTYAHLFDDKVMKQLKRRRYTGWGRLSRKLINGIRDKQSGKTILDFLKSDGFANRNFMQLIHDDSLTFKEDIQKAQVSGQGDSLHEHIANLAGSPAIKKGILQTVKVVDELVKVMGRHKPENIVIEMARENQTTQKGQKNSRERMKRIEEGIKELGSQILKEHPVENTQLQNEKLYLYYLQNGRDMYVDQELDINRLSDYDVDAIVPQSFLKDDSIDNKVLTRSDKNRGKSDNVPSEEVVKKMKNYWRQLLNAKLITQRKFDNLTKAERGGLSELDKAGFIKRQLVETRQITKHVAQILDSRMNTKYDENDKLIREVKVITLKSKLVSDFRKDFQFYKVREINNYHHAHDAYLNAVVGTALIKKYPKLESEFVYGDYKVYDVRKMIAKSEQEIGKATAKYFFYSNIMNFFKTEITLANGEIRKRPLIETNGETGEIVWDKGRDFATVRKVLSMPQVNIVKKTEVQTGGFSKESILPKRNSDKLIARKKDWDPKKYGGFDSPTVAYSVLVVAKVEKGKSKKLKSVKELLGITIMERSSFEKNPIDFLEAKGYKEVKKDLIIKLPKYSLFELENGRKRMLASAGELQKGNELALPSKYVNFLYLASHYEKLKGSPEDNEQKQLFVEQHKHYLDEIIEQISEFSKRVILADANLDKVLSAYNKHRDKPIREQAENIIHLFTLTNLGAPAAFKYFDTTIDRKRYTSTKEVLDATLIHQSITGLYETRIDLSQLGGDNSKKRSLEDNETEIKVSRDTWNTKNMRSLEPPRSKKRIH

SEQ ID NO: 64 - protein, 1719 aa, Artificial Sequence
  chemically synthesized
MPKKKRKVSSFLDGIDKAQDEHEKYHSNWRAMASDFNLPPVVAKEIVASCDKCQLKGEAMHGQVDCSPGIWQLDCTHLEGKVILVAVHVASGYIEAEVIPAETGQETAYFLLKLAGRWPVKTIHTNNGSNFTGATVRAACWWAGIKQEFGIPYNPQSQGVVESMNKELKKIIGQVRDQAEHLKTAVQMAVFIHNFKRKGGIGGYSAGERIVDIIATDIQTKELQKQITKIQNFRVYYRDSRNPLWKGPAKLLWKGEGAVVIQDNSDIKVVPRRKAKIIRDYGKQMAGDDCVASRQDEDGGGGSGGGGSGGGGSDKKYSIGLAIGTNSVGWAVITDEYKVPSKKFKVLGNTDRHSIKKNLIGALLFDSGETAEATRLKRTARRRYTRRKNRICYLQEIFSNEMAKVDDSFFHRLEESFLVEEDKKHERHPIFGNIVDEVAYHEKYPTIYHLRKKLVDSTDKADLRLIYLALAHMIKFRGHFLIEGDLNPDNSDVDKLFIQLVQTYNQLFEENPINASGVDAKAILSARLSKSRRLENLIAQLPGEKKNGLFGNLIALSLGLTPNFKSNFDLAEDAKLQLSKDTYDDDLDNLLAQIGDQYADLFLAAKNLSDAILLSDILRVNTEITKAPLSASMIKRYDEHHQDLTLLKALVRQQLPEKYKEIFFDQSKNGYAGYIDGGASQEEFYKFIKPILEKMDGTEELLVKLNREDLLRKQRTFDNGSIPHQIHLGELHAILRRQEDFYPFLKDNREKIEKILTFRIPYYVGPLARGNSRFAWMTRKSEETITPWNFEEVVDKGASAQSFIERMTNFDKNLPNEKVLPKHSLLYEYFTVYNELTKVKYVTEGMRKPAFLSGEQKKAIVDLLFKTNRKVTVKQLKEDYFKKIECFDSVEISGVEDRFNASLGTYHDLLKIIKDKDFLDNEENEDILEDIVLTLTLFEDREMIEERLKTYAHLFDDKVMKQLKRRRYTGWGRLSRKLINGIRDKQSGKTILDFLKSDGFANRNFMQLIHDDSLTFKEDIQKAQVSGQGDSLHEHIANLAGSPAIKKGILQTVKVVDELVKVMGRHKPENIVIEMARENQTTQKGQKNSRERMKRIEEGIKELGSQILKEHPVENTQLQNEKLYLYYLQNGRDMYVDQELDINRLSDYDVDAIVPQSFLKDDSIDNKVLTRSDKNRGKSDNVPSEEVVKKMKNYWRQLLNAKLITQRKFDNLTKAERGGLSELDKAGFIKRQLVETRQITKHVAQILDSRMNTKYDENDKLIREVKVITLKSKLVSDFRKDFQFYKVREINNYHHAHDAYLNAVVGTALIKKYPKLESEFVYGDYKVYDVRKMIAKSEQEIGKATAKYFFYSNIMNFFKTEITLANGEIRKRPLIETNGETGEIVWDKGRDFATVRKVLSMPQVNIVKKTEVQTGGFSKESILPKRNSDKLIARKKDWDPKKYGGFDSPTVAYSVLVVAKVEKGKSKKLKSVKELLGITIMERSSFEKNPIDFLEAKGYKEVKKDLIIKLPKYSLFELENGRKRMLASAGELQKGNELALPSKYVNFLYLASHYEKLKGSPEDNEQKQLFVEQHKHYLDEIIEQISEFSKRVILADANLDKVLSAYNKHRDKPIREQAENIIHLFTLTNLGAPAAFKYFDTTIDRKRYTSTKEVLDATLIHQSITGLYETRIDLSQLGGDNSKKRSLEDNETEIKVSRDTWNTKNMRSLEPPRSKKRIH

SEQ ID NO: 65 - protein, 1653 aa, Artificial Sequence
  chemically synthesized
MPKKKRKVSSFLDGIDKAQDEHEKYHSNWRAMASDFNLPPVVAKEIVASCDKCQLKGEAMHGQVDCSPGIWQLDCTHLEGKVILVAVHVASGYIEAEVIPAETGQETAYFLLKLAGRWPVKTIHTNNGSNFTGATVRAACWWAGIKQEFGIPYNPQSQGVVESMNKELKKIIGQVRDQAEHLKTAVQMAVFIHNFKRKGGIGGYSAGERIVDIIATDIQTKELQKQITKIQNGGGGSGGGGSGGGGSDKKYSIGLAIGTNSVGWAVITDEYKVPSKKFKVLGNTDRHSIKKNLIGALLFDSGETAEATRLKRTARRRYTRRKNRICYLQEIFSNEMAKVDDSFFHRLEESFLVEEDKKHERHPIFGNIVDEVAYHEKYPTIYHLRKKLVDSTDKADLRLIYLALAHMIKFRGHFLIEGDLNPDNSDVDKLFIQLVQTYNQLFEENPINASGVDAKAILSARLSKSRRLENLIAQLPGEKKNGLFGNLIALSLGLTPNFKSNFDLAEDAKLQLSKDTYDDDLDNLLAQIGDQYADLFLAAKNLSDAILLSDILRVNTEITKAPLSASMIKRYDEHHQDLTLLKALVRQQLPEKYKEIFFDQSKNGYAGYIDGGASQEEFYKFIKPILEKMDGTEELLVKLNREDLLRKQRTFDNGSIPHQIHLGELHAILRRQEDFYPFLKDNREKIEKILTFRIPYYVGPLARGNSRFAWMTRKSEETITPWNFEEVVDKGASAQSFIERMTNFDKNLPNEKVLPKHSLLYEYFTVYNELTKVKYVTEGMRKPAFLSGEQKKAIVDLLFKTNRKVTVKQLKEDYFKKIECFDSVEISGVEDRFNASLGTYHDLLKIIKDKDFLDNEENEDILEDIVLTLTLFEDREMIEERLKTYAHLFDDKVMKQLKRRRYTGWGRLSRKLINGIRDKQSGKTILDFLKSDGFANRNFMQLIHDDSLTFKEDIQKAQVSGQGDSLHEHIANLAGSPAIKKGILQTVKVVDELVKVMGRHKPENIVIEMARENQTTQKGQKNSRERMKRIEEGIKELGSQILKEHPVENTQLQNEKLYLYYLQNGRDMYVDQELDINRLSDYDVDAIVPQSFLKDDSIDNKVLTRSDKNRGKSDNVPSEEVVKKMKNYWRQLLNAKLITQRKFDNLTKAERGGLSELDKAGFIKRQLVETRQITKHVAQILDSRMNTKYDENDKLIREVKVITLKSKLVSDFRKDFQFYKVREINNYHHAHDAYLNAVVGTALIKKYPKLESEFVYGDYKVYDVRKMIAKSEQEIGKATAKYFFYSNIMNFFKTEITLANGEIRKRPLIETNGETGEIVWDKGRDFATVRKVLSMPQVNIVKKTEVQTGGFSKESILPKRNSDKLIARKKDWDPKKYGGFDSPTVAYSVLVVAKVEKGKSKKLKSVKELLGITIMERSSFEKNPIDFLEAKGYKEVKKDLIIKLPKYSLFELENGRKRMLASAGELQKGNELALPSKYVNFLYLASHYEKLKGSPEDNEQKQLFVEQHKHYLDEIIEQISEFSKRVILADANLDKVLSAYNKHRDKPIREQAENIIHLFTLTNLGAPAAFKYFDTTIDRKRYTSTKEVLDATLIHQSITGLYETRIDLSQLGGDNSKKRSLEDNETEIKVSRDTWNTKNMRSLEPPRSKKRIH

SEQ ID NO: 66 - protein, 1719 aa, Artificial Sequence
  chemically synthesized
MPKKKRKVSSFLDGIDKAQDEHEKYHSNWRAMASDFNLPPVVAKEIVASCDKCQLKGEAMHGQVDCSPGIWQLDCTHLEGKVILVAVHVASGYIEAEVIPAETGQETAYFLLKLAGRWPVKTIHTDNGSNFTGATVRAACWWAGIKQEFGIPYNPQSQGVVESMNKELKKIIGQVRDQAEHLKTAVQMAVFIHNKKRKGGIGGYSAGERIVDIIATDIQTKELQKQITKIQNFRVYYRDSRNPLWKGPAKLLWKGEGAVVIQDNSDIKVVPRRKAKIIRDYGKQMAGDDSVASRQDEDGGGGSGGGGSGGGGSDKKYSIGLAIGTNSVGWAVITDEYKVPSKKFKVLGNTDRHSIKKNLIGALLFDSGETAEATRLKRTARRRYTRRKNRICYLQEIFSNEMAKVDDSFFHRLEESFLVEEDKKHERHPIFGNIVDEVAYHEKYPTIYHLRKKLVDSTDKADLRLIYLALAHMIKFRGHFLIEGDLNPDNSDVDKLFIQLVQTYNQLFEENPINASGVDAKAILSARLSKSRRLENLIAQLPGEKKNGLFGNLIALSLGLTPNFKSNFDLAEDAKLQLSKDTYDDDLDNLLAQIGDQYADLFLAAKNLSDAILLSDILRVNTEITKAPLSASMIKRYDEHHQDLTLLKALVRQQLPEKYKEIFFDQSKNGYAGYIDGGASQEEFYKFIKPILEKMDGTEELLVKLNREDLLRKQRTFDNGSIPHQIHLGELHAILRRQEDFYPFLKDNREKIEKILTFRIPYYVGPLARGNSRFAWMTRKSEETITPWNFEEVVDKGASAQSFIERMTNFDKNLPNEKVLPKHSLLYEYFTVYNELTKVKYVTEGMRKPAFLSGEQKKAIVDLLFKTNRKVTVKQLKEDYFKKIECFDSVEISGVEDRFNASLGTYHDLLKIIKDKDFLDNEENEDILEDIVLTLTLFEDREMIEERLKTYAHLFDDKVMKQLKRRRYTGWGRLSRKLINGIRDKQSGKTILDFLKSDGFANRNFMQLIHDDSLTFKEDIQKAQVSGQGDSLHEHIANLAGSPAIKKGILQTVKVVDELVKVMGRHKPENIVIEMARENQTTQKGQKNSRERMKRIEEGIKELGSQILKEHPVENTQLQNEKLYLYYLQNGRDMYVDQELDINRLSDYDVDAIVPQSFLKDDSIDNKVLTRSDKNRGKSDNVPSEEVVKKMKNYWRQLLNAKLITQRKFDNLTKAERGGLSELDKAGFIKRQLVETRQITKHVAQILDSRMNTKYDENDKLIREVKVITLKSKLVSDFRKDFQFYKVREINNYHHAHDAYLNAVVGTALIKKYPKLESEFVYGDYKVYDVRKMIAKSEQEIGKATAKYFFYSNIMNFFKTEITLANGEIRKRPLIETNGETGEIVWDKGRDFATVRKVLSMPQVNIVKKTEVQTGGFSKESILPKRNSDKLIARKKDWDPKKYGGFDSPTVAYSVLVVAKVEKGKSKKLKSVKELLGITIMERSSFEKNPIDFLEAKGYKEVKKDLIIKLPKYSLFELENGRKRMLASAGELQKGNELALPSKYVNFLYLASHYEKLKGSPEDNEQKQLFVEQHKHYLDEIIEQISEFSKRVILADANLDKVLSAYNKHRDKPIREQAENIIHLFTLTNLGAPAAFKYFDTTIDRKRYTSTKEVLDATLIHQSITGLYETRIDLSQLGGDNSKKRSLEDNETEIKVSRDTWNTKNMRSLEPPRSKKRIH

SEQ ID NO: 67 - protein, 1719 aa, Artificial Sequence
  chemically synthesized
MPKKKRKVSSFLDGIDKAQDEHEKYHSNWRAMASDFNLPPVVAKEIVASCDKCQLKGEAMHGQVDCSPGIWQLDCTHLEGKVILVAVHVASGYIEAEVIPAETGQETAYFLLKLAGRWPVKTIHTDNGSNFTGATVRAACWWAGIKQEFGIPYNPQSQGVVESMNKELKKIIGQVRDQAEHLKTAVQMAVFIHNFKRKGGIGGYSAGERIVDIIATDIQTKELQKQITKIQNFRVYYRDSRNPLWKGPAKLLWKGEGAVVIQDNSDIKVVPRRKAKIIRDYGKQMAGDDSVASRQDEDGGGGSGGGGSGGGGSDKKYSIGLAIGTNSVGWAVITDEYKVPSKKFKVLGNTDRHSIKKNLIGALLFDSGETAEATRLKRTARRRYTRRKNRICYLQEIFSNEMAKVDDSFFHRLEESFLVEEDKKHERHPIFGNIVDEVAYHEKYPTIYHLRKKLVDSTDKADLRLIYLALAHMIKFRGHFLIEGDLNPDNSDVDKLFIQLVQTYNQLFEENPINASGVDAKAILSARLSKSRRLENLIAQLPGEKKNGLFGNLIALSLGLTPNFKSNFDLAEDAKLQLSKDTYDDDLDNLLAQIGDQYADLFLAAKNLSDAILLSDILRVNTEITKAPLSASMIKRYDEHHQDLTLLKALVRQQLPEKYKEIFFDQSKNGYAGYIDGGASQEEFYKFIKPILEKMDGTEELLVKLNREDLLRKQRTFDNGSIPHQIHLGELHAILRRQEDFYPFLKDNREKIEKILTFRIPYYVGPLARGNSRFAWMTRKSEETITPWNFEEVVDKGASAQSFIERMTNFDKNLPNEKVLPKHSLLYEYFTVYNELTKVKYVTEGMRKPAFLSGEQKKAIVDLLFKTNRKVTVKQLKEDYFKKIECFDSVEISGVEDRFNASLGTYHDLLKIIKDKDFLDNEENEDILEDIVLTLTLFEDREMIEERLKTYAHLFDDKVMKQLKRRRYTGWGRLSRKLINGIRDKQSGKTILDFLKSDGFANRNFMQLIHDDSLTFKEDIQKAQVSGQGDSLHEHIANLAGSPAIKKGILQTVKVVDELVKVMGRHKPENIVIEMARENQTTQKGQKNSRERMKRIEEGIKELGSQILKEHPVENTQLQNEKLYLYYLQNGRDMYVDQELDINRLSDYDVDAIVPQSFLKDDSIDNKVLTRSDKNRGKSDNVPSEEVVKKMKNYWRQLLNAKLITQRKFDNLTKAERGGLSELDKAGFIKRQLVETRQITKHVAQILDSRMNTKYDENDKLIREVKVITLKSKLVSDFRKDFQFYKVREINNYHHAHDAYLNAVVGTALIKKYPKLESEFVYGDYKVYDVRKMIAKSEQEIGKATAKYFFYSNIMNFFKTEITLANGEIRKRPLIETNGETGEIVWDKGRDFATVRKVLSMPQVNIVKKTEVQTGGFSKESILPKRNSDKLIARKKDWDPKKYGGFDSPTVAYSVLVVAKVEKGKSKKLKSVKELLGITIMERSSFEKNPIDFLEAKGYKEVKKDLIIKLPKYSLFELENGRKRMLASAGELQKGNELALPSKYVNFLYLASHYEKLKGSPEDNEQKQLFVEQHKHYLDEIIEQISEFSKRVILADANLDKVLSAYNKHRDKPIREQAENIIHLFTLTNLGAPAAFKYFDTTIDRKRYTSTKEVLDATLIHQSITGLYETRIDLSQLGGDNSKKRSLEDNETEIKVSRDTWNTKNMRSLEPPRSKKRIH

SEQ ID NO: 68 - protein, 1719 aa, Artificial Sequence
  chemically synthesized
MPKKKRKVSSFLDGIDKAQDEHEKYHSNWRAMASDFNLPPVVAKEIVASCDKCQLKGEAMHGQVDCSPGIWQLDCTHLEGKVILVAVHVASGYIEAEVIPAETGQETAYFLLKLAGRWPVKTIHTDNGSNFTGATVRAACWWAGIKQEFGIPYNPQSQGVVESMNKELKKIIGQVRDQAEHLKTAVQMAVFIHNKKRKGGIGGYSAGERIVDIIATDIQTKELQKQITKIQNFRVYYRDSRNPLWKGPAKLLWKGEGAVVIQDNSDIKVVPRRKAKIIRDYGKQMAGDDCVASRQDEDGGGGSGGGGSGGGGSDKKYSIGLAIGTNSVGWAVITDEYKVPSKKFKVLGNTDRHSIKKNLIGALLFDSGETAEATRLKRTARRRYTRRKNRICYLQEIFSNEMAKVDDSFFHRLEESFLVEEDKKHERHPIFGNIVDEVAYHEKYPTIYHLRKKLVDSTDKADLRLIYLALAHMIKFRGHFLIEGDLNPDNSDVDKLFIQLVQTYNQLFEENPINASGVDAKAILSARLSKSRRLENLIAQLPGEKKNGLFGNLIALSLGLTPNFKSNFDLAEDAKLQLSKDTYDDDLDNLLAQIGDQYADLFLAAKNLSDAILLSDILRVNTEITKAPLSASMIKRYDEHHQDLTLLKALVRQQLPEKYKEIFFDQSKNGYAGYIDGGASQEEFYKFIKPILEKMDGTEELLVKLNREDLLRKQRTFDNGSIPHQIHLGELHAILRRQEDFYPFLKDNREKIEKILTFRIPYYVGPLARGNSRFAWMTRKSEETITPWNFEEVVDKGASAQSFIERMTNFDKNLPNEKVLPKHSLLYEYFTVYNELTKVKYVTEGMRKPAFLSGEQKKAIVDLLFKTNRKVTVKQLKEDYFKKIECFDSVEISGVEDRFNASLGTYHDLLKIIKDKDFLDNEENEDILEDIVLTLTLFEDREMIEERLKTYAHLFDDKVMKQLKRRRYTGWGRLSRKLINGIRDKQSGKTILDFLKSDGFANRNFMQLIHDDSLTFKEDIQKAQVSGQGDSLHEHIANLAGSPAIKKGILQTVKVVDELVKVMGRHKPENIVIEMARENQTTQKGQKNSRERMKRIEEGIKELGSQILKEHPVENTQLQNEKLYLYYLQNGRDMYVDQELDINRLSDYDVDAIVPQSFLKDDSIDNKVLTRSDKNRGKSDNVPSEEVVKKMKNYWRQLLNAKLITQRKFDNLTKAERGGLSELDKAGFIKRQLVETRQITKHVAQILDSRMNTKYDENDKLIREVKVITLKSKLVSDFRKDFQFYKVREINNYHHAHDAYLNAVVGTALIKKYPKLESEFVYGDYKVYDVRKMIAKSEQEIGKATAKYFFYSNIMNFFKTEITLANGEIRKRPLIETNGETGEIVWDKGRDFATVRKVLSMPQVNIVKKTEVQTGGFSKESILPKRNSDKLIARKKDWDPKKYGGFDSPTVAYSVLVVAKVEKGKSKKLKSVKELLGITIMERSSFEKNPIDFLEAKGYKEVKKDLIIKLPKYSLFELENGRKRMLASAGELQKGNELALPSKYVNFLYLASHYEKLKGSPEDNEQKQLFVEQHKHYLDEIIEQISEFSKRVILADANLDKVLSAYNKHRDKPIREQAENIIHLFTLTNLGAPAAFKYFDTTIDRKRYTSTKEVLDATLIHQSITGLYETRIDLSQLGGDNSKKRSLEDNETEIKVSRDTWNTKNMRSLEPPRSKKRIH

SEQ ID NO: 69 - protein, 1653 aa, Artificial Sequence
  chemically synthesized
MPKKKRKVSSFLDGIDKAQDEHEKYHSNWRAMASDFNLPPVVAKEIVASCDKCQLKGEAMHGQVDCSPGIWQLDCTHLEGKVILVAVHVASGYIEAEVIPAETGQETAYFLLKLAGRWPVKTIHTDNGSNFTGATVRAACWWAGIKQEFGIPYNPQSQGVVESMNKELKKIIGQVRDQAEHLKTAVQMAVFIHNKKRKGGIGGYSAGERIVDIIATDIQTKELQKQITKIQNGGGGSGGGGSGGGGSDKKYSIGLAIGTNSVGWAVITDEYKVPSKKFKVLGNTDRHSIKKNLIGALLFDSGETAEATRLKRTARRRYTRRKNRICYLQEIFSNEMAKVDDSFFHRLEESFLVEEDKKHERHPIFGNIVDEVAYHEKYPTIYHLRKKLVDSTDKADLRLIYLALAHMIKFRGHFLIEGDLNPDNSDVDKLFIQLVQTYNQLFEENPINASGVDAKAILSARLSKSRRLENLIAQLPGEKKNGLFGNLIALSLGLTPNFKSNFDLAEDAKLQLSKDTYDDDLDNLLAQIGDQYADLFLAAKNLSDAILLSDILRVNTEITKAPLSASMIKRYDEHHQDLTLLKALVRQQLPEKYKEIFFDQSKNGYAGYIDGGASQEEFYKFIKPILEKMDGTEELLVKLNREDLLRKQRTFDNGSIPHQIHLGELHAILRRQEDFYPFLKDNREKIEKILTFRIPYYVGPLARGNSRFAWMTRKSEETITPWNFEEVVDKGASAQSFIERMTNFDKNLPNEKVLPKHSLLYEYFTVYNELTKVKYVTEGMRKPAFLSGEQKKAIVDLLFKTNRKVTVKQLKEDYFKKIECFDSVEISGVEDRFNASLGTYHDLLKIIKDKDFLDNEENEDILEDIVLTLTLFEDREMIEERLKTYAHLFDDKVMKQLKRRRYTGWGRLSRKLINGIRDKQSGKTILDFLKSDGFANRNFMQLIHDDSLTFKEDIQKAQVSGQGDSLHEHIANLAGSPAIKKGILQTVKVVDELVKVMGRHKPENIVIEMARENQTTQKGQKNSRERMKRIEEGIKELGSQILKEHPVENTQLQNEKLYLYYLQNGRDMYVDQELDINRLSDYDVDAIVPQSFLKDDSIDNKVLTRSDKNRGKSDNVPSEEVVKKMKNYWRQLLNAKLITQRKFDNLTKAERGGLSELDKAGFIKRQLVETRQITKHVAQILDSRMNTKYDENDKLIREVKVITLKSKLVSDFRKDFQFYKVREINNYHHAHDAYLNAVVGTALIKKYPKLESEFVYGDYKVYDVRKMIAKSEQEIGKATAKYFFYSNIMNFFKTEITLANGEIRKRPLIETNGETGEIVWDKGRDFATVRKVLSMPQVNIVKKTEVQTGGFSKESILPKRNSDKLIARKKDWDPKKYGGFDSPTVAYSVLVVAKVEKGKSKKLKSVKELLGITIMERSSFEKNPIDFLEAKGYKEVKKDLIIKLPKYSLFELENGRKRMLASAGELQKGNELALPSKYVNFLYLASHYEKLKGSPEDNEQKQLFVEQHKHYLDEIIEQISEFSKRVILADANLDKVLSAYNKHRDKPIREQAENIIHLFTLTNLGAPAAFKYFDTTIDRKRYTSTKEVLDATLIHQSITGLYETRIDLSQLGGDNSKKRSLEDNETEIKVSRDTWNTKNMRSLEPPRSKKRIH

SEQ ID NO: 70 - protein, 1719 aa, Artificial Sequence
  chemically synthesized
MPKKKRKVSSFLDGIDKAQDEHEKYHSNWRAMASDFNLPPVVAKEIVASCDKCQLKGEAMHGQVDCSPGIWQLDCTHLEGKVILVAVHVASGYIEAEVIPAETGQEAAYFLLKLAGRWPVKTIHTDNGSNFTGATVRAACWWAGIKQEFGIPRNPQSQGVVESMNKELKKIIGQVRDQAEHLKTAVQMAVFIHNFKRKGGIGGYSAGERIVDIIATDIQTKELQKQITKIQNFRVYYRDSRNPLWKGPAKLLWKGEGAVVIQDNSDIKVVPRRKAKIIRDYGKQMAGDDCVASRQDEDGGGGSGGGGSGGGGSDKKYSIGLAIGTNSVGWAVITDEYKVPSKKFKVLGNTDRHSIKKNLIGALLFDSGETAEATRLKRTARRRYTRRKNRICYLQEIFSNEMAKVDDSFFHRLEESFLVEEDKKHERHPIFGNIVDEVAYHEKYPTIYHLRKKLVDSTDKADLRLIYLALAHMIKFRGHFLIEGDLNPDNSDVDKLFIQLVQTYNQLFEENPINASGVDAKAILSARLSKSRRLENLIAQLPGEKKNGLFGNLIALSLGLTPNFKSNFDLAEDAKLQLSKDTYDDDLDNLLAQIGDQYADLFLAAKNLSDAILLSDILRVNTEITKAPLSASMIKRYDEHHQDLTLLKALVRQQLPEKYKEIFFDQSKNGYAGYIDGGASQEEFYKFIKPILEKMDGTEELLVKLNREDLLRKQRTFDNGSIPHQIHLGELHAILRRQEDFYPFLKDNREKIEKILTFRIPYYVGPLARGNSRFAWMTRKSEETITPWNFEEVVDKGASAQSFIERMTNFDKNLPNEKVLPKHSLLYEYFTVYNELTKVKYVTEGMRKPAFLSGEQKKAIVDLLFKTNRKVTVKQLKEDYFKKIECFDSVEISGVEDRFNASLGTYHDLLKIIKDKDFLDNEENEDILEDIVLTLTLFEDREMIEERLKTYAHLFDDKVMKQLKRRRYTGWGRLSRKLINGIRDKQSGKTILDFLKSDGFANRNFMQLIHDDSLTFKEDIQKAQVSGQGDSLHEHIANLAGSPAIKKGILQTVKVVDELVKVMGRHKPENIVIEMARENQTTQKGQKNSRERMKRIEEGIKELGSQILKEHPVENTQLQNEKLYLYYLQNGRDMYVDQELDINRLSDYDVDAIVPQSFLKDDSIDNKVLTRSDKNRGKSDNVPSEEVVKKMKNYWRQLLNAKLITQRKFDNLTKAERGGLSELDKAGFIKRQLVETRQITKHVAQILDSRMNTKYDENDKLIREVKVITLKSKLVSDFRKDFQFYKVREINNYHHAHDAYLNAVVGTALIKKYPKLESEFVYGDYKVYDVRKMIAKSEQEIGKATAKYFFYSNIMNFFKTEITLANGEIRKRPLIETNGETGEIVWDKGRDFATVRKVLSMPQVNIVKKTEVQTGGFSKESILPKRNSDKLIARKKDWDPKKYGGFDSPTVAYSVLVVAKVEKGKSKKLKSVKELLGITIMERSSFEKNPIDFLEAKGYKEVKKDLIIKLPKYSLFELENGRKRMLASAGELQKGNELALPSKYVNFLYLASHYEKLKGSPEDNEQKQLFVEQHKHYLDEIIEQISEFSKRVILADANLDKVLSAYNKHRDKPIREQAENIIHLFTLTNLGAPAAFKYFDTTIDRKRYTSTKEVLDATLIHQSITGLYETRIDLSQLGGDNSKKRSLEDNETEIKVSRDTWNTKNMRSLEPPRSKKRIH

SEQ ID NO: 71 - protein, 1653 aa, Artificial Sequence
  chemically synthesized
MPKKKRKVSSFLDGIDKAQDEHEKYHSNWRAMASDFNLPPVVAKEIVASCDKCQLKGEAMHGQVDCSPGIWQLDCTHLEGKVILVAVHVASGYIEAEVIPAETGQEAAYFLLKLAGRWPVKTIHTDNGSNFTGATVRAACWWAGIKQEFGIPRNPQSQGVVESMNKELKKIIGQVRDQAEHLKTAVQMAVFIHNFKRKGGIGGYSAGERIVDIIATDIQTKELQKQITKIQNGGGGSGGGGSGGGGSDKKYSIGLAIGTNSVGWAVITDEYKVPSKKFKVLGNTDRHSIKKNLIGALLFDSGETAEATRLKRTARRRYTRRKNRICYLQEIFSNEMAKVDDSFFHRLEESFLVEEDKKHERHPIFGNIVDEVAYHEKYPTIYHLRKKLVDSTDKADLRLIYLALAHMIKFRGHFLIEGDLNPDNSDVDKLFIQLVQTYNQLFEENPINASGVDAKAILSARLSKSRRLENLIAQLPGEKKNGLFGNLIALSLGLTPNFKSNFDLAEDAKLQLSKDTYDDDLDNLLAQIGDQYADLFLAAKNLSDAILLSDILRVNTEITKAPLSASMIKRYDEHHQDLTLLKALVRQQLPEKYKEIFFDQSKNGYAGYIDGGASQEEFYKFIKPILEKMDGTEELLVKLNREDLLRKQRTFDNGSIPHQIHLGELHAILRRQEDFYPFLKDNREKIEKILTFRIPYYVGPLARGNSRFAWMTRKSEETITPWNFEEVVDKGASAQSFIERMTNFDKNLPNEKVLPKHSLLYEYFTVYNELTKVKYVTEGMRKPAFLSGEQKKAIVDLLFKTNRKVTVKQLKEDYFKKIECFDSVEISGVEDRFNASLGTYHDLLKIIKDKDFLDNEENEDILEDIVLTLTLFEDREMIEERLKTYAHLFDDKVMKQLKRRRYTGWGRLSRKLINGIRDKQSGKTILDFLKSDGFANRNFMQLIHDDSLTFKEDIQKAQVSGQGDSLHEHIANLAGSPAIKKGILQTVKVVDELVKVMGRHKPENIVIEMARENQTTQKGQKNSRERMKRIEEGIKELGSQILKEHPVENTQLQNEKLYLYYLQNGRDMYVDQELDINRLSDYDVDAIVPQSFLKDDSIDNKVLTRSDKNRGKSDNVPSEEVVKKMKNYWRQLLNAKLITQRKFDNLTKAERGGLSELDKAGFIKRQLVETRQITKHVAQILDSRMNTKYDENDKLIREVKVITLKSKLVSDFRKDFQFYKVREINNYHHAHDAYLNAVVGTALIKKYPKLESEFVYGDYKVYDVRKMIAKSEQEIGKATAKYFFYSNIMNFFKTEITLANGEIRKRPLIETNGETGEIVWDKGRDFATVRKVLSMPQVNIVKKTEVQTGGFSKESILPKRNSDKLIARKKDWDPKKYGGFDSPTVAYSVLVVAKVEKGKSKKLKSVKELLGITIMERSSFEKNPIDFLEAKGYKEVKKDLIIKLPKYSLFELENGRKRMLASAGELQKGNELALPSKYVNFLYLASHYEKLKGSPEDNEQKQLFVEQHKHYLDEIIEQISEFSKRVILADANLDKVLSAYNKHRDKPIREQAENIIHLFTLTNLGAPAAFKYFDTTIDRKRYTSTKEVLDATLIHQSITGLYETRIDLSQLGGDNSKKRSLEDNETEIKVSRDTWNTKNMRSLEPPRSKKRIH

SEQ ID NO: 72 - protein, 1719 aa, Artificial Sequence
  chemically synthesized
MPKKKRKVSSFLDGIDKAQDEHEKYHSNWRAMASDFNLPPVVAKEIVASCDKCQLKGEAMHGQVDCSPGIWQLDCTHLEGKVILVAVHVASGYIEAEVIPAETGQETAYFLLKLAGRWPVKTIHTDNGSNFTGATVRAACWWAGIKQEFSIPYNPQSHGVVESMNKELKKIIGQVRDQAEHLKTAVQMAVFIHNFKRKGGIGGYSAGERIVDIIATDIQTKELQKQITKIQNFRVYYRDSRNPLWKGPAKLLWKGEGAVVIQDNSDIKVVPRRKAKIIRDYGKQMAGDDCVASRQDEDGGGGSGGGGSGGGGSDKKYSIGLAIGTNSVGWAVITDEYKVPSKKFKVLGNTDRHSIKKNLIGALLFDSGETAEATRLKRTARRRYTRRKNRICYLQEIFSNEMAKVDDSFFHRLEESFLVEEDKKHERHPIFGNIVDEVAYHEKYPTIYHLRKKLVDSTDKADLRLIYLALAHMIKFRGHFLIEGDLNPDNSDVDKLFIQLVQTYNQLFEENPINASGVDAKAILSARLSKSRRLENLIAQLPGEKKNGLFGNLIALSLGLTPNFKSNFDLAEDAKLQLSKDTYDDDLDNLLAQIGDQYADLFLAAKNLSDAILLSDILRVNTEITKAPLSASMIKRYDEHHQDLTLLKALVRQQLPEKYKEIFFDQSKNGYAGYIDGGASQEEFYKFIKPILEKMDGTEELLVKLNREDLLRKQRTFDNGSIPHQIHLGELHAILRRQEDFYPFLKDNREKIEKILTFRIPYYVGPLARGNSRFAWMTRKSEETITPWNFEEVVDKGASAQSFIERMTNFDKNLPNEKVLPKHSLLYEYFTVYNELTKVKYVTEGMRKPAFLSGEQKKAIVDLLFKTNRKVTVKQLKEDYFKKIECFDSVEISGVEDRFNASLGTYHDLLKIIKDKDFLDNEENEDILEDIVLTLTLFEDREMIEERLKTYAHLFDDKVMKQLKRRRYTGWGRLSRKLINGIRDKQSGKTILDFLKSDGFANRNFMQLIHDDSLTFKEDIQKAQVSGQGDSLHEHIANLAGSPAIKKGILQTVKVVDELVKVMGRHKPENIVIEMARENQTTQKGQKNSRERMKRIEEGIKELGSQILKEHPVENTQLQNEKLYLYYLQNGRDMYVDQELDINRLSDYDVDAIVPQSFLKDDSIDNKVLTRSDKNRGKSDNVPSEEVVKKMKNYWRQLLNAKLITQRKFDNLTKAERGGLSELDKAGFIKRQLVETRQITKHVAQILDSRMNTKYDENDKLIREVKVITLKSKLVSDFRKDFQFYKVREINNYHHAHDAYLNAVVGTALIKKYPKLESEFVYGDYKVYDVRKMIAKSEQEIGKATAKYFFYSNIMNFFKTEITLANGEIRKRPLIETNGETGEIVWDKGRDFATVRKVLSMPQVNIVKKTEVQTGGFSKESILPKRNSDKLIARKKDWDPKKYGGFDSPTVAYSVLVVAKVEKGKSKKLKSVKELLGITIMERSSFEKNPIDFLEAKGYKEVKKDLIIKLPKYSLFELENGRKRMLASAGELQKGNELALPSKYVNFLYLASHYEKLKGSPEDNEQKQLFVEQHKHYLDEIIEQISEFSKRVILADANLDKVLSAYNKHRDKPIREQAENIIHLFTLTNLGAPAAFKYFDTTIDRKRYTSTKEVLDATLIHQSITGLYETRIDLSQLGGDNSKKRSLEDNETEIKVSRDTWNTKNMRSLEPPRSKKRIH

SEQ ID NO: 73 - protein, 1653 aa, Artificial Sequence
  chemically synthesized
MPKKKRKVSSFLDGIDKAQDEHEKYHSNWRAMASDFNLPPVVAKEIVASCDKCQLKGEAMHGQVDCSPGIWQLDCTHLEGKVILVAVHVASGYIEAEVIPAETGQETAYFLLKLAGRWPVKTIHTDNGSNFTGATVRAACWWAGIKQEFSIPYNPQSHGVVESMNKELKKIIGQVRDQAEHLKTAVQMAVFIHNFKRKGGIGGYSAGERIVDIIATDIQTKELQKQITKIQNGGGGSGGGGSGGGGSDKKYSIGLAIGTNSVGWAVITDEYKVPSKKFKVLGNTDRHSIKKNLIGALLFDSGETAEATRLKRTARRRYTRRKNRICYLQEIFSNEMAKVDDSFFHRLEESFLVEEDKKHERHPIFGNIVDEVAYHEKYPTIYHLRKKLVDSTDKADLRLIYLALAHMIKFRGHFLIEGDLNPDNSDVDKLFIQLVQTYNQLFEENPINASGVDAKAILSARLSKSRRLENLIAQLPGEKKNGLFGNLIALSLGLTPNFKSNFDLAEDAKLQLSKDTYDDDLDNLLAQIGDQYADLFLAAKNLSDAILLSDILRVNTEITKAPLSASMIKRYDEHHQDLTLLKALVRQQLPEKYKEIFFDQSKNGYAGYIDGGASQEEFYKFIKPILEKMDGTEELLVKLNREDLLRKQRTFDNGSIPHQIHLGELHAILRRQEDFYPFLKDNREKIEKILTFRIPYYVGPLARGNSRFAWMTRKSEETITPWNFEEVVDKGASAQSFIERMTNFDKNLPNEKVLPKHSLLYEYFTVYNELTKVKYVTEGMRKPAFLSGEQKKAIVDLLFKTNRKVTVKQLKEDYFKKIECFDSVEISGVEDRFNASLGTYHDLLKIIKDKDFLDNEENEDILEDIVLTLTLFEDREMIEERLKTYAHLFDDKVMKQLKRRRYTGWGRLSRKLINGIRDKQSGKTILDFLKSDGFANRNFMQLIHDDSLTFKEDIQKAQVSGQGDSLHEHIANLAGSPAIKKGILQTVKVVDELVKVMGRHKPENIVIEMARENQTTQKGQKNSRERMKRIEEGIKELGSQILKEHPVENTQLQNEKLYLYYLQNGRDMYVDQELDINRLSDYDVDAIVPQSFLKDDSIDNKVLTRSDKNRGKSDNVPSEEVVKKMKNYWRQLLNAKLITQRKFDNLTKAERGGLSELDKAGFIKRQLVETRQITKHVAQILDSRMNTKYDENDKLIREVKVITLKSKLVSDFRKDFQFYKVREINNYHHAHDAYLNAVVGTALIKKYPKLESEFVYGDYKVYDVRKMIAKSEQEIGKATAKYFFYSNIMNFFKTEITLANGEIRKRPLIETNGETGEIVWDKGRDFATVRKVLSMPQVNIVKKTEVQTGGFSKESILPKRNSDKLIARKKDWDPKKYGGFDSPTVAYSVLVVAKVEKGKSKKLKSVKELLGITIMERSSFEKNPIDFLEAKGYKEVKKDLIIKLPKYSLFELENGRKRMLASAGELQKGNELALPSKYVNFLYLASHYEKLKGSPEDNEQKQLFVEQHKHYLDEIIEQISEFSKRVILADANLDKVLSAYNKHRDKPIREQAENIIHLFTLTNLGAPAAFKYFDTTIDRKRYTSTKEVLDATLIHQSITGLYETRIDLSQLGGDNSKKRSLEDNETEIKVSRDTWNTKNMRSLEPPRSKKRIH

SEQ ID NO: 74 - protein, 1754 aa, Artificial Sequence
  chemically synthesized
MPKKKRKVSSPLREAKDLHTALHIGPRALSKACNISMQQAREVVQTCPHCNSAPALEAGVNPRGLGPLQIWQTDFTLEPRMAPRSWLAVTVDTASSAIVVTQHGRVTSVAVQHHWATAIAVLGRPKAIKTDNGSCFTSKSTREWLARWGIAHTTGIPGNSQGQAMVERANRLLKDRIRVLAEGDGFMKRIPTSKQGELLAKAMYALNHFERGENTKTPIQKHWRPTVLTEGPPVKIRIETGEWEKGWNVLVWGRGYAAVKNRDTDKVIWVPSRKVKPDITQKDEVTKKDEASPLFAGISDWIPWEDEQEGLQGETASNKQERPGEDTLAANESGGGGSGGGGSGGGGSDKKYSIGLAIGTNSVGWAVITDEYKVPSKKFKVLGNTDRHSIKKNLIGALLFDSGETAEATRLKRTARRRYTRRKNRICYLQEIFSNEMAKVDDSFFHRLEESFLVEEDKKHERHPIFGNIVDEVAYHEKYPTIYHLRKKLVDSTDKADLRLIYLALAHMIKFRGHFLIEGDLNPDNSDVDKLFIQLVQTYNQLFEENPINASGVDAKAILSARLSKSRRLENLIAQLPGEKKNGLFGNLIALSLGLTPNFKSNFDLAEDAKLQLSKDTYDDDLDNLLAQIGDQYADLFLAAKNLSDAILLSDILRVNTEITKAPLSASMIKRYDEHHQDLTLLKALVRQQLPEKYKEIFFDQSKNGYAGYIDGGASQEEFYKFIKPILEKMDGTEELLVKLNREDLLRKQRTFDNGSIPHQIHLGELHAILRRQEDFYPFLKDNREKIEKILTFRIPYYVGPLARGNSRFAWMTRKSEETITPWNFEEVVDKGASAQSFIERMTNFDKNLPNEKVLPKHSLLYEYFTVYNELTKVKYVTEGMRKPAFLSGEQKKAIVDLLFKTNRKVTVKQLKEDYFKKIECFDSVEISGVEDRFNASLGTYHDLLKIIKDKDFLDNEENEDILEDIVLTLTLFEDREMIEERLKTYAHLFDDKVMKQLKRRRYTGWGRLSRKLINGIRDKQSGKTILDFLKSDGFANRNFMQLIHDDSLTFKEDIQKAQVSGQGDSLHEHIANLAGSPAIKKGILQTVKVVDELVKVMGRHKPENIVIEMARENQTTQKGQKNSRERMKRIEEGIKELGSQILKEHPVENTQLQNEKLYLYYLQNGRDMYVDQELDINRLSDYDVDAIVPQSFLKDDSIDNKVLTRSDKNRGKSDNVPSEEVVKKMKNYWRQLLNAKLITQRKFDNLTKAERGGLSELDKAGFIKRQLVETRQITKHVAQILDSRMNTKYDENDKLIREVKVITLKSKLVSDFRKDFQFYKVREINNYHHAHDAYLNAVVGTALIKKYPKLESEFVYGDYKVYDVRKMIAKSEQEIGKATAKYFFYSNIMNFFKTEITLANGEIRKRPLIETNGETGEIVWDKGRDFATVRKVLSMPQVNIVKKTEVQTGGFSKESILPKRNSDKLIARKKDWDPKKYGGFDSPTVAYSVLVVAKVEKGKSKKLKSVKELLGITIMERSSFEKNPIDFLEAKGYKEVKKDLIIKLPKYSLFELENGRKRMLASAGELQKGNELALPSKYVNFLYLASHYEKLKGSPEDNEQKQLFVEQHKHYLDEIIEQISEFSKRVILADANLDKVLSAYNKHRDKPIREQAENIIHLFTLTNLGAPAAFKYFDTTIDRKRYTSTKEVLDATLIHQSITGLYETRIDLSQLGGDNSKKRSLEDNETEIKVSRDTWNTKNMRSLEPPRSKKRIH

SEQ ID NO: 75 - protein, 1652 aa, Artificial Sequence
  chemically synthesized
MPKKKRKVSSPLREAKDLHTALHIGPRALSKACNISMQQAREVVQTCPHCNSAPALEAGVNPRGLGPLQIWQTDFTLEPRMAPRSWLAVTVDTASSAIVVTQHGRVTSVAVQHHWATAIAVLGRPKAIKTDNGSCFTSKSTREWLARWGIAHTTGIPGNSQGQAMVERANRLLKDRIRVLAEGDGFMKRIPTSKQGELLAKAMYALNHFERGENTKTPIQKHWRPTVLTEGGGGGSGGGGSGGGGSDKKYSIGLAIGTNSVGWAVITDEYKVPSKKFKVLGNTDRHSIKKNLIGALLFDSGETAEATRLKRTARRRYTRRKNRICYLQEIFSNEMAKVDDSFFHRLEESFLVEEDKKHERHPIFGNIVDEVAYHEKYPTIYHLRKKLVDSTDKADLRLIYLALAHMIKFRGHFLIEGDLNPDNSDVDKLFIQLVQTYNQLFEENPINASGVDAKAILSARLSKSRRLENLIAQLPGEKKNGLFGNLIALSLGLTPNFKSNFDLAEDAKLQLSKDTYDDDLDNLLAQIGDQYADLFLAAKNLSDAILLSDILRVNTEITKAPLSASMIKRYDEHHQDLTLLKALVRQQLPEKYKEIFFDQSKNGYAGYIDGGASQEEFYKFIKPILEKMDGTEELLVKLNREDLLRKQRTFDNGSIPHQIHLGELHAILRRQEDFYPFLKDNREKIEKILTFRIPYYVGPLARGNSRFAWMTRKSEETITPWNFEEVVDKGASAQSFIERMTNFDKNLPNEKVLPKHSLLYEYFTVYNELTKVKYVTEGMRKPAFLSGEQKKAIVDLLFKTNRKVTVKQLKEDYFKKIECFDSVEISGVEDRFNASLGTYHDLLKIIKDKDFLDNEENEDILEDIVLTLTLFEDREMIEERLKTYAHLFDDKVMKQLKRRRYTGWGRLSRKLINGIRDKQSGKTILDFLKSDGFANRNFMQLIHDDSLTFKEDIQKAQVSGQGDSLHEHIANLAGSPAIKKGILQTVKVVDELVKVMGRHKPENIVIEMARENQTTQKGQKNSRERMKRIEEGIKELGSQILKEHPVENTQLQNEKLYLYYLQNGRDMYVDQELDINRLSDYDVDAIVPQSFLKDDSIDNKVLTRSDKNRGKSDNVPSEEVVKKMKNYWRQLLNAKLITQRKFDNLTKAERGGLSELDKAGFIKRQLVETRQITKHVAQILDSRMNTKYDENDKLIREVKVITLKSKLVSDFRKDFQFYKVREINNYHHAHDAYLNAVVGTALIKKYPKLESEFVYGDYKVYDVRKMIAKSEQEIGKATAKYFFYSNIMNFFKTEITLANGEIRKRPLIETNGETGEIVWDKGRDFATVRKVLSMPQVNIVKKTEVQTGGFSKESILPKRNSDKLIARKKDWDPKKYGGFDSPTVAYSVLVVAKVEKGKSKKLKSVKELLGITIMERSSFEKNPIDFLEAKGYKEVKKDLIIKLPKYSLFELENGRKRMLASAGELQKGNELALPSKYVNFLYLASHYEKLKGSPEDNEQKQLFVEQHKHYLDEIIEQISEFSKRVILADANLDKVLSAYNKHRDKPIREQAENIIHLFTLTNLGAPAAFKYFDTTIDRKRYTSTKEVLDATLIHQSITGLYETRIDLSQLGGDNSKKRSLEDNETEIKVSRDTWNTKNMRSLEPPRSKKRIH

SEQ ID NO: 76 - protein, 1823 aa, Artificial Sequence
  chemically synthesized
MPKKKRKVSSCNTKKPNLDAELDQLLQGHYIKGYPKQYTYFLEDGKVKVSRPEGVKIIPPQSDRQKIVLQAHNLAHTGREATLLKIANLYWWPNMRKDVVKQLGRCQQCLITNASNKASGPILRPDRPQKPFDKFFIDYIGPLPPSQGYLYVLVVVDGMTGFTWLYPTKAPSTSATVKSLNVLTSIAIPKVIHSDQGAAFTSSTFAEWAKERGIHLEFSTPYHPQSGSKVERKNSDIKRLLTKLLVGRPTKWYDLLPVVQLALNNTYSPVLKYTPHQLLFGIDSNTPFANQDTLDLTREEELSLLQEIRTSLYHPSTPPASSRSWSPVVGQLVQERVARPASLRPRWHKPSTVLKVLNPRTVVILDHLGNNRTVSIDNLKPTSHQNGTTNDTATMDHLEKNEGGGGSGGGGSGGGGSDKKYSIGLAIGTNSVGWAVITDEYKVPSKKFKVLGNTDRHSIKKNLIGALLFDSGETAEATRLKRTARRRYTRRKNRICYLQEIFSNEMAKVDDSFFHRLEESFLVEEDKKHERHPIFGNIVDEVAYHEKYPTIYHLRKKLVDSTDKADLRLIYLALAHMIKFRGHFLIEGDLNPDNSDVDKLFIQLVQTYNQLFEENPINASGVDAKAILSARLSKSRRLENLIAQLPGEKKNGLFGNLIALSLGLTPNFKSNFDLAEDAKLQLSKDTYDDDLDNLLAQIGDQYADLFLAAKNLSDAILLSDILRVNTEITKAPLSASMIKRYDEHHQDLTLLKALVRQQLPEKYKEIFFDQSKNGYAGYIDGGASQEEFYKFIKPILEKMDGTEELLVKLNREDLLRKQRTFDNGSIPHQIHLGELHAILRRQEDFYPFLKDNREKIEKILTFRIPYYVGPLARGNSRFAWMTRKSEETITPWNFEEVVDKGASAQSFIERMTNFDKNLPNEKVLPKHSLLYEYFTVYNELTKVKYVTEGMRKPAFLSGEQKKAIVDLLFKTNRKVTVKQLKEDYFKKIECFDSVEISGVEDRFNASLGTYHDLLKIIKDKDFLDNEENEDILEDIVLTLTLFEDREMIEERLKTYAHLFDDKVMKQLKRRRYTGWGRLSRKLINGIRDKQSGKTILDFLKSDGFANRNFMQLIHDDSLTFKEDIQKAQVSGQGDSLHEHIANLAGSPAIKKGILQTVKVVDELVKVMGRHKPENIVIEMARENQTTQKGQKNSRERMKRIEEGIKELGSQILKEHPVENTQLQNEKLYLYYLQNGRDMYVDQELDINRLSDYDVDAIVPQSFLKDDSIDNKVLTRSDKNRGKSDNVPSEEVVKKMKNYWRQLLNAKLITQRKFDNLTKAERGGLSELDKAGFIKRQLVETRQITKHVAQILDSRMNTKYDENDKLIREVKVITLKSKLVSDFRKDFQFYKVREINNYHHAHDAYLNAVVGTALIKKYPKLESEFVYGDYKVYDVRKMIAKSEQEIGKATAKYFFYSNIMNFFKTEITLANGEIRKRPLIETNGETGEIVWDKGRDFATVRKVLSMPQVNIVKKTEVQTGGFSKESILPKRNSDKLIARKKDWDPKKYGGFDSPTVAYSVLVVAKVEKGKSKKLKSVKELLGITIMERSSFEKNPIDFLEAKGYKEVKKDLIIKLPKYSLFELENGRKRMLASAGELQKGNELALPSKYVNFLYLASHYEKLKGSPEDNEQKQLFVEQHKHYLDEIIEQISEFSKRVILADANLDKVLSAYNKHRDKPIREQAENIIHLFTLTNLGAPAAFKYFDTTIDRKRYTSTKEVLDATLIHQSITGLYETRIDLSQLGGDNSKKRSLEDNETEIKVSRDTWNTKNMRSLEPPRSKKRIH

SEQ ID NO: 77 - protein, 1747 aa, Artificial Sequence
  chemically synthesized
MPKKKRKVSSCNTKKPNLDAELDQLLQGHYIKGYPKQYTYFLEDGKVKVSRPEGVKIIPPQSDRQKIVLQAHNLAHTGREATLLKIANLYWWPNMRKDVVKQLGRCQQCLITNASNKASGPILRPDRPQKPFDKFFIDYIGPLPPSQGYLYVLVVVDGMTGFTWLYPTKAPSTSATVKSLNVLTSIAIPKVIHSDQGAAFTSSTFAEWAKERGIHLEFSTPYHPQSGSKVERKNSDIKRLLTKLLVGRPTKWYDLLPVVQLALNNTYSPVLKYTPHQLLFGIDSNTPFANQDTLDLTREEELSLLQEIRTSLYHPSTPPASSRSWSGGGGSGGGGSGGGGSDKKYSIGLAIGTNSVGWAVITDEYKVPSKKFKVLGNTDRHSIKKNLIGALLFDSGETAEATRLKRTARRRYTRRKNRICYLQEIFSNEMAKVDDSFFHRLEESFLVEEDKKHERHPIFGNIVDEVAYHEKYPTIYHLRKKLVDSTDKADLRLIYLALAHMIKFRGHFLIEGDLNPDNSDVDKLFIQLVQTYNQLFEENPINASGVDAKAILSARLSKSRRLENLIAQLPGEKKNGLFGNLIALSLGLTPNFKSNFDLAEDAKLQLSKDTYDDDLDNLLAQIGDQYADLFLAAKNLSDAILLSDILRVNTEITKAPLSASMIKRYDEHHQDLTLLKALVRQQLPEKYKEIFFDQSKNGYAGYIDGGASQEEFYKFIKPILEKMDGTEELLVKLNREDLLRKQRTFDNGSIPHQIHLGELHAILRRQEDFYPFLKDNREKIEKILTFRIPYYVGPLARGNSRFAWMTRKSEETITPWNFEEVVDKGASAQSFIERMTNFDKNLPNEKVLPKHSLLYEYFTVYNELTKVKYVTEGMRKPAFLSGEQKKAIVDLLFKTNRKVTVKQLKEDYFKKIECFDSVEISGVEDRFNASLGTYHDLLKIIKDKDFLDNEENEDILEDIVLTLTLFEDREMIEERLKTYAHLFDDKVMKQLKRRRYTGWGRLSRKLINGIRDKQSGKTILDFLKSDGFANRNFMQLIHDDSLTFKEDIQKAQVSGQGDSLHEHIANLAGSPAIKKGILQTVKVVDELVKVMGRHKPENIVIEMARENQTTQKGQKNSRERMKRIEEGIKELGSQILKEHPVENTQLQNEKLYLYYLQNGRDMYVDQELDINRLSDYDVDAIVPQSFLKDDSIDNKVLTRSDKNRGKSDNVPSEEVVKKMKNYWRQLLNAKLITQRKFDNLTKAERGGLSELDKAGFIKRQLVETRQITKHVAQILDSRMNTKYDENDKLIREVKVITLKSKLVSDFRKDFQFYKVREINNYHHAHDAYLNAVVGTALIKKYPKLESEFVYGDYKVYDVRKMIAKSEQEIGKATAKYFFYSNIMNFFKTEITLANGEIRKRPLIETNGETGEIVWDKGRDFATVRKVLSMPQVNIVKKTEVQTGGFSKESILPKRNSDKLIARKKDWDPKKYGGFDSPTVAYSVLVVAKVEKGKSKKLKSVKELLGITIMERSSFEKNPIDFLEAKGYKEVKKDLIIKLPKYSLFELENGRKRMLASAGELQKGNELALPSKYVNFLYLASHYEKLKGSPEDNEQKQLFVEQHKHYLDEIIEQISEFSKRVILADANLDKVLSAYNKHRDKPIREQAENIIHLFTLTNLGAPAAFKYFDTTIDRKRYTSTKEVLDATLIHQSITGLYETRIDLSQLGGDNSKKRSLEDNETEIKVSRDTWNTKNMRSLEPPRSKKRIH

SEQ ID NO: 78 - protein, 1708 aa, Artificial Sequence
  chemically synthesized
MPKKKRKVSSGSTGVFWVENIQEAQDEHENWHTSPKILARNYKIPLTVAKQITQECPHCTKQGSGPAGCVMRSPNHWQADCTHLDNKIILTFVESNSGYIHATLLSKENALCTSLAILEWARLFSPKSLHTDNGTNFVAEPVVNLLKFLKIAHTTGIPYHPESQGIVERANRTLKEKIQSHRDNTQTLEAALQLALITCNKGRESMGGQTPWEVFITNQAQVIHEKLLLQQAQSSKKFCFYKIPGEHDWKGPTRVLWKGDGAVVVNDEGKGIIAVPLTRTKLLIKPNGGGGSGGGGSGGGGSDKKYSIGLAIGTNSVGWAVITDEYKVPSKKFKVLGNTDRHSIKKNLIGALLFDSGETAEATRLKRTARRRYTRRKNRICYLQEIFSNEMAKVDDSFFHRLEESFLVEEDKKHERHPIFGNIVDEVAYHEKYPTIYHLRKKLVDSTDKADLRLIYLALAHMIKFRGHFLIEGDLNPDNSDVDKLFIQLVQTYNQLFEENPINASGVDAKAILSARLSKSRRLENLIAQLPGEKKNGLFGNLIALSLGLTPNFKSNFDLAEDAKLQLSKDTYDDDLDNLLAQIGDQYADLFLAAKNLSDAILLSDILRVNTEITKAPLSASMIKRYDEHHQDLTLLKALVRQQLPEKYKEIFFDQSKNGYAGYIDGGASQEEFYKFIKPILEKMDGTEELLVKLNREDLLRKQRTFDNGSIPHQIHLGELHAILRRQEDFYPFLKDNREKIEKILTFRIPYYVGPLARGNSRFAWMTRKSEETITPWNFEEVVDKGASAQSFIERMTNFDKNLPNEKVLPKHSLLYEYFTVYNELTKVKYVTEGMRKPAFLSGEQKKAIVDLLFKTNRKVTVKQLKEDYFKKIECFDSVEISGVEDRFNASLGTYHDLLKIIKDKDFLDNEENEDILEDIVLTLTLFEDREMIEERLKTYAHLFDDKVMKQLKRRRYTGWGRLSRKLINGIRDKQSGKTILDFLKSDGFANRNFMQLIHDDSLTFKEDIQKAQVSGQGDSLHEHIANLAGSPAIKKGILQTVKVVDELVKVMGRHKPENIVIEMARENQTTQKGQKNSRERMKRIEEGIKELGSQILKEHPVENTQLQNEKLYLYYLQNGRDMYVDQELDINRLSDYDVDAIVPQSFLKDDSIDNKVLTRSDKNRGKSDNVPSEEVVKKMKNYWRQLLNAKLITQRKFDNLTKAERGGLSELDKAGFIKRQLVETRQITKHVAQILDSRMNTKYDENDKLIREVKVITLKSKLVSDFRKDFQFYKVREINNYHHAHDAYLNAVVGTALIKKYPKLESEFVYGDYKVYDVRKMIAKSEQEIGKATAKYFFYSNIMNFFKTEITLANGEIRKRPLIETNGETGEIVWDKGRDFATVRKVLSMPQVNIVKKTEVQTGGFSKESILPKRNSDKLIARKKDWDPKKYGGFDSPTVAYSVLVVAKVEKGKSKKLKSVKELLGITIMERSSFEKNPIDFLEAKGYKEVKKDLIIKLPKYSLFELENGRKRMLASAGELQKGNELALPSKYVNFLYLASHYEKLKGSPEDNEQKQLFVEQHKHYLDEIIEQISEFSKRVILADANLDKVLSAYNKHRDKPIREQAENIIHLFTLTNLGAPAAFKYFDTTIDRKRYTSTKEVLDATLIHQSITGLYETRIDLSQLGGDNSKKRSLEDNETEIKVSRDTWNTKNMRSLEPPRSKKRIH

SEQ ID NO: 79 - protein, 1656 aa, Artificial Sequence
  chemically synthesized
MPKKKRKVSSGSTGVFWVENIQEAQDEHENWHTSPKILARNYKIPLTVAKQITQECPHCTKQGSGPAGCVMRSPNHWQADCTHLDNKIILTFVESNSGYIHATLLSKENALCTSLAILEWARLFSPKSLHTDNGTNFVAEPVVNLLKFLKIAHTTGIPYHPESQGIVERANRTLKEKIQSHRDNTQTLEAALQLALITCNKGRESMGGQTPWEVFITNQAQVIHEKLLLQQAQSSGGGGSGGGGSGGGGSDKKYSIGLAIGTNSVGWAVITDEYKVPSKKFKVLGNTDRHSIKKNLIGALLFDSGETAEATRLKRTARRRYTRRKNRICYLQEIFSNEMAKVDDSFFHRLEESFLVEEDKKHERHPIFGNIVDEVAYHEKYPTIYHLRKKLVDSTDKADLRLIYLALAHMIKFRGHFLIEGDLNPDNSDVDKLFIQLVQTYNQLFEENPINASGVDAKAILSARLSKSRRLENLIAQLPGEKKNGLFGNLIALSLGLTPNFKSNFDLAEDAKLQLSKDTYDDDLDNLLAQIGDQYADLFLAAKNLSDAILLSDILRVNTEITKAPLSASMIKRYDEHHQDLTLLKALVRQQLPEKYKEIFFDQSKNGYAGYIDGGASQEEFYKFIKPILEKMDGTEELLVKLNREDLLRKQRTFDNGSIPHQIHLGELHAILRRQEDFYPFLKDNREKIEKILTFRIPYYVGPLARGNSRFAWMTRKSEETITPWNFEEVVDKGASAQSFIERMTNFDKNLPNEKVLPKHSLLYEYFTVYNELTKVKYVTEGMRKPAFLSGEQKKAIVDLLFKTNRKVTVKQLKEDYFKKIECFDSVEISGVEDRFNASLGTYHDLLKIIKDKDFLDNEENEDILEDIVLTLTLFEDREMIEERLKTYAHLFDDKVMKQLKRRRYTGWGRLSRKLINGIRDKQSGKTILDFLKSDGFANRNFMQLIHDDSLTFKEDIQKAQVSGQGDSLHEHIANLAGSPAIKKGILQTVKVVDELVKVMGRHKPENIVIEMARENQTTQKGQKNSRERMKRIEEGIKELGSQILKEHPVENTQLQNEKLYLYYLQNGRDMYVDQELDINRLSDYDVDAIVPQSFLKDDSIDNKVLTRSDKNRGKSDNVPSEEVVKKMKNYWRQLLNAKLITQRKFDNLTKAERGGLSELDKAGFIKRQLVETRQITKHVAQILDSRMNTKYDENDKLIREVKVITLKSKLVSDFRKDFQFYKVREINNYHHAHDAYLNAVVGTALIKKYPKLESEFVYGDYKVYDVRKMIAKSEQEIGKATAKYFFYSNIMNFFKTEITLANGEIRKRPLIETNGETGEIVWDKGRDFATVRKVLSMPQVNIVKKTEVQTGGFSKESILPKRNSDKLIARKKDWDPKKYGGFDSPTVAYSVLVVAKVEKGKSKKLKSVKELLGITIMERSSFEKNPIDFLEAKGYKEVKKDLIIKLPKYSLFELENGRKRMLASAGELQKGNELALPSKYVNFLYLASHYEKLKGSPEDNEQKQLFVEQHKHYLDEIIEQISEFSKRVILADANLDKVLSAYNKHRDKPIREQAENIIHLFTLTNLGAPAAFKYFDTTIDRKRYTSTKEVLDATLIHQSITGLYETRIDLSQLGGDNSKKRSLEDNETEIKVSRDTWNTKNMRSLEPPRSKKRIH

SEQ ID NO: 80 - protein, 1839 aa, Artificial Sequence
  chemically synthesized
MPKKKRKVSSIENSSPYTSEHFHYTVTDIKDLTKLGAIYDKTKKYWVYQGKPVMPDQFTFELLDFLHQLTHLSFSKMKALLERSHSPYYMLNRDRTLKNITETCKACAQVNASKSAVKQGTRVRGHRPGTHWEIDFTEIKPGLYGYKYLLVFIDTFSGWIEAFPTKKETAKVVTKKLLEEIFPRFGMPQVLGTDNGPAFVSKVSQTVADLLGIDWKLHCAYRPQSSGQVERMNRTIKETLTKLTLATGSRDWVLLLPLALYRARNTPGPHGLTPYEILYGAPPPLVNFPDPDMTRVTNSPSLQAHLQALYLVQHEVWRPLAAAYQEQLDRPVVPHPYRVGDTVWVRRHQTKNLEPRWKGPYTVLLTTPTALKVDGIAAWIHAAHVKAADPGGGPSSRLTWRVQRSQNPLKIRLTREAPGGGGSGGGGSGGGGSDKKYSIGLAIGTNSVGWAVITDEYKVPSKKFKVLGNTDRHSIKKNLIGALLFDSGETAEATRLKRTARRRYTRRKNRICYLQEIFSNEMAKVDDSFFHRLEESFLVEEDKKHERHPIFGNIVDEVAYHEKYPTIYHLRKKLVDSTDKADLRLIYLALAHMIKFRGHFLIEGDLNPDNSDVDKLFIQLVQTYNQLFEENPINASGVDAKAILSARLSKSRRLENLIAQLPGEKKNGLFGNLIALSLGLTPNFKSNFDLAEDAKLQLSKDTYDDDLDNLLAQIGDQYADLFLAAKNLSDAILLSDILRVNTEITKAPLSASMIKRYDEHHQDLTLLKALVRQQLPEKYKEIFFDQSKNGYAGYIDGGASQEEFYKFIKPILEKMDGTEELLVKLNREDLLRKQRTFDNGSIPHQIHLGELHAILRRQEDFYPFLKDNREKIEKILTFRIPYYVGPLARGNSRFAWMTRKSEETITPWNFEEVVDKGASAQSFIERMTNFDKNLPNEKVLPKHSLLYEYFTVYNELTKVKYVTEGMRKPAFLSGEQKKAIVDLLFKTNRKVTVKQLKEDYFKKIECFDSVEISGVEDRFNASLGTYHDLLKIIKDKDFLDNEENEDILEDIVLTLTLFEDREMIEERLKTYAHLFDDKVMKQLKRRRYTGWGRLSRKLINGIRDKQSGKTILDFLKSDGFANRNFMQLIHDDSLTFKEDIQKAQVSGQGDSLHEHIANLAGSPAIKKGILQTVKVVDELVKVMGRHKPENIVIEMARENQTTQKGQKNSRERMKRIEEGIKELGSQILKEHPVENTQLQNEKLYLYYLQNGRDMYVDQELDINRLSDYDVDAIVPQSFLKDDSIDNKVLTRSDKNRGKSDNVPSEEVVKKMKNYWRQLLNAKLITQRKFDNLTKAERGGLSELDKAGFIKRQLVETRQITKHVAQILDSRMNTKYDENDKLIREVKVITLKSKLVSDFRKDFQFYKVREINNYHHAHDAYLNAVVGTALIKKYPKLESEFVYGDYKVYDVRKMIAKSEQEIGKATAKYFFYSNIMNFFKTEITLANGEIRKRPLIETNGETGEIVWDKGRDFATVRKVLSMPQVNIVKKTEVQTGGFSKESILPKRNSDKLIARKKDWDPKKYGGFDSPTVAYSVLVVAKVEKGKSKKLKSVKELLGITIMERSSFEKNPIDFLEAKGYKEVKKDLIIKLPKYSLFELENGRKRMLASAGELQKGNELALPSKYVNFLYLASHYEKLKGSPEDNEQKQLFVEQHKHYLDEIIEQISEFSKRVILADANLDKVLSAYNKHRDKPIREQAENIIHLFTLTNLGAPAAFKYFDTTIDRKRYTSTKEVLDATLIHQSITGLYETRIDLSQLGGDNSKKRSLEDNETEIKVSRDTWNTKNMRSLEPPRSKKRIH

SEQ ID NO: 81 - protein, 1757 aa, Artificial Sequence
  chemically synthesized
MPKKKRKVSSIENSSPYTSEHFHYTVTDIKDLTKLGAIYDKTKKYWVYQGKPVMPDQFTFELLDFLHQLTHLSFSKMKALLERSHSPYYMLNRDRTLKNITETCKACAQVNASKSAVKQGTRVRGHRPGTHWEIDFTEIKPGLYGYKYLLVFIDTFSGWIEAFPTKKETAKVVTKKLLEEIFPRFGMPQVLGTDNGPAFVSKVSQTVADLLGIDWKLHCAYRPQSSGQVERMNRTIKETLTKLTLATGSRDWVLLLPLALYRARNTPGPHGLTPYEILYGAPPPLVNFPDPDMTRVTNSPSLQAHLQALYLVQHEVWRPLAAAYQEQLDRPVVPHPGGGGSGGGGSGGGGSDKKYSIGLAIGTNSVGWAVITDEYKVPSKKFKVLGNTDRHSIKKNLIGALLFDSGETAEATRLKRTARRRYTRRKNRICYLQEIFSNEMAKVDDSFFHRLEESFLVEEDKKHERHPIFGNIVDEVAYHEKYPTIYHLRKKLVDSTDKADLRLIYLALAHMIKFRGHFLIEGDLNPDNSDVDKLFIQLVQTYNQLFEENPINASGVDAKAILSARLSKSRRLENLIAQLPGEKKNGLFGNLIALSLGLTPNFKSNFDLAEDAKLQLSKDTYDDDLDNLLAQIGDQYADLFLAAKNLSDAILLSDILRVNTEITKAPLSASMIKRYDEHHQDLTLLKALVRQQLPEKYKEIFFDQSKNGYAGYIDGGASQEEFYKFIKPILEKMDGTEELLVKLNREDLLRKQRTFDNGSIPHQIHLGELHAILRRQEDFYPFLKDNREKIEKILTFRIPYYVGPLARGNSRFAWMTRKSEETITPWNFEEVVDKGASAQSFIERMTNFDKNLPNEKVLPKHSLLYEYFTVYNELTKVKYVTEGMRKPAFLSGEQKKAIVDLLFKTNRKVTVKQLKEDYFKKIECFDSVEISGVEDRFNASLGTYHDLLKIIKDKDFLDNEENEDILEDIVLTLTLFEDREMIEERLKTYAHLFDDKVMKQLKRRRYTGWGRLSRKLINGIRDKQSGKTILDFLKSDGFANRNFMQLIHDDSLTFKEDIQKAQVSGQGDSLHEHIANLAGSPAIKKGILQTVKVVDELVKVMGRHKPENIVIEMARENQTTQKGQKNSRERMKRIEEGIKELGSQILKEHPVENTQLQNEKLYLYYLQNGRDMYVDQELDINRLSDYDVDAIVPQSFLKDDSIDNKVLTRSDKNRGKSDNVPSEEVVKKMKNYWRQLLNAKLITQRKFDNLTKAERGGLSELDKAGFIKRQLVETRQITKHVAQILDSRMNTKYDENDKLIREVKVITLKSKLVSDFRKDFQFYKVREINNYHHAHDAYLNAVVGTALIKKYPKLESEFVYGDYKVYDVRKMIAKSEQEIGKATAKYFFYSNIMNFFKTEITLANGEIRKRPLIETNGETGEIVWDKGRDFATVRKVLSMPQVNIVKKTEVQTGGFSKESILPKRNSDKLIARKKDWDPKKYGGFDSPTVAYSVLVVAKVEKGKSKKLKSVKELLGITIMERSSFEKNPIDFLEAKGYKEVKKDLIIKLPKYSLFELENGRKRMLASAGELQKGNELALPSKYVNFLYLASHYEKLKGSPEDNEQKQLFVEQHKHYLDEIIEQISEFSKRVILADANLDKVLSAYNKHRDKPIREQAENIIHLFTLTNLGAPAAFKYFDTTIDRKRYTSTKEVLDATLIHQSITGLYETRIDLSQLGGDNSKKRSLEDNETEIKVSRDTWNTKNMRSLEPPRSKKRIH

SEQ ID NO: 82 - protein, 1749 aa, Artificial Sequence
  chemically synthesized
MPKKKRKVSSLESAQESHALHHQNAAALRFQFHITREQAREIVKLCPNCPDWGHAPQLGVNPRGLKPRVLWQMDVTHVSEFGKLKYVHVTVDTYSHFTFATARTGEATKDVLQHLAQSFAYMGIPQKIKTDNAPAYVSRSIQEFLARWKISHVTGIPYNPQGQAIVERTHQNIKAQLNKLQKAGKYYTPHHLLAHALFVLNHVNMDNQGHTAAERHWGPISADPKPMVMWKDLLTGSWKGPDVLITAGRGYACVFPQDAETPIWVPDRFIRPFTERKEATPTPGTAEKTPPRDEKDQQESPKNESSPHQREDGLATSAGVDLRSGGGPGGGGSGGGGSGGGGSDKKYSIGLAIGTNSVGWAVITDEYKVPSKKFKVLGNTDRHSIKKNLIGALLFDSGETAEATRLKRTARRRYTRRKNRICYLQEIFSNEMAKVDDSFFHRLEESFLVEEDKKHERHPIFGNIVDEVAYHEKYPTIYHLRKKLVDSTDKADLRLIYLALAHMIKFRGHFLIEGDLNPDNSDVDKLFIQLVQTYNQLFEENPINASGVDAKAILSARLSKSRRLENLIAQLPGEKKNGLFGNLIALSLGLTPNFKSNFDLAEDAKLQLSKDTYDDDLDNLLAQIGDQYADLFLAAKNLSDAILLSDILRVNTEITKAPLSASMIKRYDEHHQDLTLLKALVRQQLPEKYKEIFFDQSKNGYAGYIDGGASQEEFYKFIKPILEKMDGTEELLVKLNREDLLRKQRTFDNGSIPHQIHLGELHAILRRQEDFYPFLKDNREKIEKILTFRIPYYVGPLARGNSRFAWMTRKSEETITPWNFEEVVDKGASAQSFIERMTNFDKNLPNEKVLPKHSLLYEYFTVYNELTKVKYVTEGMRKPAFLSGEQKKAIVDLLFKTNRKVTVKQLKEDYFKKIECFDSVEISGVEDRFNASLGTYHDLLKIIKDKDFLDNEENEDILEDIVLTLTLFEDREMIEERLKTYAHLFDDKVMKQLKRRRYTGWGRLSRKLINGIRDKQSGKTILDFLKSDGFANRNFMQLIHDDSLTFKEDIQKAQVSGQGDSLHEHIANLAGSPAIKKGILQTVKVVDELVKVMGRHKPENIVIEMARENQTTQKGQKNSRERMKRIEEGIKELGSQILKEHPVENTQLQNEKLYLYYLQNGRDMYVDQELDINRLSDYDVDAIVPQSFLKDDSIDNKVLTRSDKNRGKSDNVPSEEVVKKMKNYWRQLLNAKLITQRKFDNLTKAERGGLSELDKAGFIKRQLVETRQITKHVAQILDSRMNTKYDENDKLIREVKVITLKSKLVSDFRKDFQFYKVREINNYHHAHDAYLNAVVGTALIKKYPKLESEFVYGDYKVYDVRKMIAKSEQEIGKATAKYFFYSNIMNFFKTEITLANGEIRKRPLIETNGETGEIVWDKGRDFATVRKVLSMPQVNIVKKTEVQTGGFSKESILPKRNSDKLIARKKDWDPKKYGGFDSPTVAYSVLVVAKVEKGKSKKLKSVKELLGITIMERSSFEKNPIDFLEAKGYKEVKKDLIIKLPKYSLFELENGRKRMLASAGELQKGNELALPSKYVNFLYLASHYEKLKGSPEDNEQKQLFVEQHKHYLDEIIEQISEFSKRVILADANLDKVLSAYNKHRDKPIREQAENIIHLFTLTNLGAPAAFKYFDTTIDRKRYTSTKEVLDATLIHQSITGLYETRIDLSQLGGDNSKKRSLEDNETEIKVSRDTWNTKNMRSLEPPRSKKRIH

SEQ ID NO: 83 - protein, 1643 aa, Artificial Sequence
  chemically synthesized
MPKKKRKVSSLESAQESHALHHQNAAALRFQFHITREQAREIVKLCPNCPDWGHAPQLGVNPRGLKPRVLWQMDVTHVSEFGKLKYVHVTVDTYSHFTFATARTGEATKDVLQHLAQSFAYMGIPQKIKTDNAPAYVSRSIQEFLARWKISHVTGIPYNPQGQAIVERTHQNIKAQLNKLQKAGKYYTPHHLLAHALFVLNHVNMDNQGHTAAERHWGPISAGGGGSGGGGSGGGGSDKKYSIGLAIGTNSVGWAVITDEYKVPSKKFKVLGNTDRHSIKKNLIGALLFDSGETAEATRLKRTARRRYTRRKNRICYLQEIFSNEMAKVDDSFFHRLEESFLVEEDKKHERHPIFGNIVDEVAYHEKYPTIYHLRKKLVDSTDKADLRLIYLALAHMIKFRGHFLIEGDLNPDNSDVDKLFIQLVQTYNQLFEENPINASGVDAKAILSARLSKSRRLENLIAQLPGEKKNGLFGNLIALSLGLTPNFKSNFDLAEDAKLQLSKDTYDDDLDNLLAQIGDQYADLFLAAKNLSDAILLSDILRVNTEITKAPLSASMIKRYDEHHQDLTLLKALVRQQLPEKYKEIFFDQSKNGYAGYIDGGASQEEFYKFIKPILEKMDGTEELLVKLNREDLLRKQRTFDNGSIPHQIHLGELHAILRRQEDFYPFLKDNREKIEKILTFRIPYYVGPLARGNSRFAWMTRKSEETITPWNFEEVVDKGASAQSFIERMTNFDKNLPNEKVLPKHSLLYEYFTVYNELTKVKYVTEGMRKPAFLSGEQKKAIVDLLFKTNRKVTVKQLKEDYFKKIECFDSVEISGVEDRFNASLGTYHDLLKIIKDKDFLDNEENEDILEDIVLTLTLFEDREMIEERLKTYAHLFDDKVMKQLKRRRYTGWGRLSRKLINGIRDKQSGKTILDFLKSDGFANRNFMQLIHDDSLTFKEDIQKAQVSGQGDSLHEHIANLAGSPAIKKGILQTVKVVDELVKVMGRHKPENIVIEMARENQTTQKGQKNSRERMKRIEEGIKELGSQILKEHPVENTQLQNEKLYLYYLQNGRDMYVDQELDINRLSDYDVDAIVPQSFLKDDSIDNKVLTRSDKNRGKSDNVPSEEVVKKMKNYWRQLLNAKLITQRKFDNLTKAERGGLSELDKAGFIKRQLVETRQITKHVAQILDSRMNTKYDENDKLIREVKVITLKSKLVSDFRKDFQFYKVREINNYHHAHDAYLNAVVGTALIKKYPKLESEFVYGDYKVYDVRKMIAKSEQEIGKATAKYFFYSNIMNFFKTEITLANGEIRKRPLIETNGETGEIVWDKGRDFATVRKVLSMPQVNIVKKTEVQTGGFSKESILPKRNSDKLIARKKDWDPKKYGGFDSPTVAYSVLVVAKVEKGKSKKLKSVKELLGITIMERSSFEKNPIDFLEAKGYKEVKKDLIIKLPKYSLFELENGRKRMLASAGELQKGNELALPSKYVNFLYLASHYEKLKGSPEDNEQKQLFVEQHKHYLDEIIEQISEFSKRVILADANLDKVLSAYNKHRDKPIREQAENIIHLFTLTNLGAPAAFKYFDTTIDRKRYTSTKEVLDATLIHQSITGLYETRIDLSQLGGDNSKKRSLEDNETEIKVSRDTWNTKNMRSLEPPRSKKRIH

SEQ ID NO: 84 - protein, 1811 aa, Artificial Sequence
  chemically synthesized
MPKKKRKVSSVLKKGDALASTDLVMEYSETDEKFTAGAELHDGVFMRGDLIVPPLEMLHAILLAIHGVSHTHKGGIMSYFSKFWTHPKASQTIDLILGHCQICLKHNPKYKSRLQGHRPLPSRPFAHLQIDFVQMCVKKPMYALVIIDVFSKWPEIIPCNKEDAKTVCDILMKDIIPRWGLPDQIDSDQGTHFTAKISQELTHSIGVAWKLHCPGHPRSSGIVERTNRTLKSKIIKAQEQLQLSKWTEVLPYVLLEMRATPKKHGLSPHEIVMGRPMKTTYLSDMSPLWATDTLVTYMNKLTRQLSAYHQQVVDQWPSTSLPPGPEPGSWCMLRNPKKSSNWEGPFLILLSTPTAVKVEGRPTWIHLDHCKLLRSSLSSSLGGPVNQLLSGGGGSGGGGSGGGGSDKKYSIGLAIGTNSVGWAVITDEYKVPSKKFKVLGNTDRHSIKKNLIGALLFDSGETAEATRLKRTARRRYTRRKNRICYLQEIFSNEMAKVDDSFFHRLEESFLVEEDKKHERHPIFGNIVDEVAYHEKYPTIYHLRKKLVDSTDKADLRLIYLALAHMIKFRGHFLIEGDLNPDNSDVDKLFIQLVQTYNQLFEENPINASGVDAKAILSARLSKSRRLENLIAQLPGEKKNGLFGNLIALSLGLTPNFKSNFDLAEDAKLQLSKDTYDDDLDNLLAQIGDQYADLFLAAKNLSDAILLSDILRVNTEITKAPLSASMIKRYDEHHQDLTLLKALVRQQLPEKYKEIFFDQSKNGYAGYIDGGASQEEFYKFIKPILEKMDGTEELLVKLNREDLLRKQRTFDNGSIPHQIHLGELHAILRRQEDFYPFLKDNREKIEKILTFRIPYYVGPLARGNSRFAWMTRKSEETITPWNFEEVVDKGASAQSFIERMTNFDKNLPNEKVLPKHSLLYEYFTVYNELTKVKYVTEGMRKPAFLSGEQKKAIVDLLFKTNRKVTVKQLKEDYFKKIECFDSVEISGVEDRFNASLGTYHDLLKIIKDKDFLDNEENEDILEDIVLTLTLFEDREMIEERLKTYAHLFDDKVMKQLKRRRYTGWGRLSRKLINGIRDKQSGKTILDFLKSDGFANRNFMQLIHDDSLTFKEDIQKAQVSGQGDSLHEHIANLAGSPAIKKGILQTVKVVDELVKVMGRHKPENIVIEMARENQTTQKGQKNSRERMKRIEEGIKELGSQILKEHPVENTQLQNEKLYLYYLQNGRDMYVDQELDINRLSDYDVDAIVPQSFLKDDSIDNKVLTRSDKNRGKSDNVPSEEVVKKMKNYWRQLLNAKLITQRKFDNLTKAERGGLSELDKAGFIKRQLVETRQITKHVAQILDSRMNTKYDENDKLIREVKVITLKSKLVSDFRKDFQFYKVREINNYHHAHDAYLNAVVGTALIKKYPKLESEFVYGDYKVYDVRKMIAKSEQEIGKATAKYFFYSNIMNFFKTEITLANGEIRKRPLIETNGETGEIVWDKGRDFATVRKVLSMPQVNIVKKTEVQTGGFSKESILPKRNSDKLIARKKDWDPKKYGGFDSPTVAYSVLVVAKVEKGKSKKLKSVKELLGITIMERSSFEKNPIDFLEAKGYKEVKKDLIIKLPKYSLFELENGRKRMLASAGELQKGNELALPSKYVNFLYLASHYEKLKGSPEDNEQKQLFVEQHKHYLDEIIEQISEFSKRVILADANLDKVLSAYNKHRDKPIREQAENIIHLFTLTNLGAPAAFKYFDTTIDRKRYTSTKEVLDATLIHQSITGLYETRIDLSQLGGDNSKKRSLEDNETEIKVSRDTWNTKNMRSLEPPRSKKRIH

SEQ ID NO: 85 - protein, 1742 aa, Artificial Sequence
  chemically synthesized
MPKKKRKVSSVLKKGDALASTDLVMEYSETDEKFTAGAELHDGVFMRGDLIVPPLEMLHAILLAIHGVSHTHKGGIMSYFSKFWTHPKASQTIDLILGHCQICLKHNPKYKSRLQGHRPLPSRPFAHLQIDFVQMCVKKPMYALVIIDVFSKWPEIIPCNKEDAKTVCDILMKDIIPRWGLPDQIDSDQGTHFTAKISQELTHSIGVAWKLHCPGHPRSSGIVERTNRTLKSKIIKAQEQLQLSKWTEVLPYVLLEMRATPKKHGLSPHEIVMGRPMKTTYLSDMSPLWATDTLVTYMNKLTRQLSAYHQQVVDQWPSTSLGGGGSGGGGSGGGGSDKKYSIGLAIGTNSVGWAVITDEYKVPSKKFKVLGNTDRHSIKKNLIGALLFDSGETAEATRLKRTARRRYTRRKNRICYLQEIFSNEMAKVDDSFFHRLEESFLVEEDKKHERHPIFGNIVDEVAYHEKYPTIYHLRKKLVDSTDKADLRLIYLALAHMIKFRGHFLIEGDLNPDNSDVDKLFIQLVQTYNQLFEENPINASGVDAKAILSARLSKSRRLENLIAQLPGEKKNGLFGNLIALSLGLTPNFKSNFDLAEDAKLQLSKDTYDDDLDNLLAQIGDQYADLFLAAKNLSDAILLSDILRVNTEITKAPLSASMIKRYDEHHQDLTLLKALVRQQLPEKYKEIFFDQSKNGYAGYIDGGASQEEFYKFIKPILEKMDGTEELLVKLNREDLLRKQRTFDNGSIPHQIHLGELHAILRRQEDFYPFLKDNREKIEKILTFRIPYYVGPLARGNSRFAWMTRKSEETITPWNFEEVVDKGASAQSFIERMTNFDKNLPNEKVLPKHSLLYEYFTVYNELTKVKYVTEGMRKPAFLSGEQKKAIVDLLFKTNRKVTVKQLKEDYFKKIECFDSVEISGVEDRFNASLGTYHDLLKIIKDKDFLDNEENEDILEDIVLTLTLFEDREMIEERLKTYAHLFDDKVMKQLKRRRYTGWGRLSRKLINGIRDKQSGKTILDFLKSDGFANRNFMQLIHDDSLTFKEDIQKAQVSGQGDSLHEHIANLAGSPAIKKGILQTVKVVDELVKVMGRHKPENIVIEMARENQTTQKGQKNSRERMKRIEEGIKELGSQILKEHPVENTQLQNEKLYLYYLQNGRDMYVDQELDINRLSDYDVDAIVPQSFLKDDSIDNKVLTRSDKNRGKSDNVPSEEVVKKMKNYWRQLLNAKLITQRKFDNLTKAERGGLSELDKAGFIKRQLVETRQITKHVAQILDSRMNTKYDENDKLIREVKVITLKSKLVSDFRKDFQFYKVREINNYHHAHDAYLNAVVGTALIKKYPKLESEFVYGDYKVYDVRKMIAKSEQEIGKATAKYFFYSNIMNFFKTEITLANGEIRKRPLIETNGETGEIVWDKGRDFATVRKVLSMPQVNIVKKTEVQTGGFSKESILPKRNSDKLIARKKDWDPKKYGGFDSPTVAYSVLVVAKVEKGKSKKLKSVKELLGITIMERSSFEKNPIDFLEAKGYKEVKKDLIIKLPKYSLFELENGRKRMLASAGELQKGNELALPSKYVNFLYLASHYEKLKGSPEDNEQKQLFVEQHKHYLDEIIEQISEFSKRVILADANLDKVLSAYNKHRDKPIREQAENIIHLFTLTNLGAPAAFKYFDTTIDRKRYTSTKEVLDATLIHQSITGLYETRIDLSQLGGDNSKKRSLEDNETEIKVSRDTWNTKNMRSLEPPRSKKRIH

SEQ ID NO: 86 - protein, 1727 aa, Artificial Sequence
  chemically synthesized
MPKKKRKVSSLPLETPEQWHKLTHCNSRALSRWPNPRISAWDPRSPATLCETCQKLNPTGGGKMRTIQRGWAPNHIWQADITHYKYKQFTYALHVFVDTYSGATHASAKRGLTTQMTIEGLLEAIVHLGRPKKLNTDQGANYTSKTFVRFCQQFGVSLSHHVPYNPTSSGLVERTNGLLKLLLSKYHLDEPHLPMTQALSRALWTHNQINLLPILKTRWELHHSPPLAVISEGGETPKGSDKLFLYKLPGQNNRRWLGPLPALVEASGGALLATDPPVWVPWRLLKAFKCLKNDGPEDAHNRSSDGGGGGSGGGGSGGGGSDKKYSIGLAIGTNSVGWAVITDEYKVPSKKFKVLGNTDRHSIKKNLIGALLFDSGETAEATRLKRTARRRYTRRKNRICYLQEIFSNEMAKVDDSFFHRLEESFLVEEDKKHERHPIFGNIVDEVAYHEKYPTIYHLRKKLVDSTDKADLRLIYLALAHMIKFRGHFLIEGDLNPDNSDVDKLFIQLVQTYNQLFEENPINASGVDAKAILSARLSKSRRLENLIAQLPGEKKNGLFGNLIALSLGLTPNFKSNFDLAEDAKLQLSKDTYDDDLDNLLAQIGDQYADLFLAAKNLSDAILLSDILRVNTEITKAPLSASMIKRYDEHHQDLTLLKALVRQQLPEKYKEIFFDQSKNGYAGYIDGGASQEEFYKFIKPILEKMDGTEELLVKLNREDLLRKQRTFDNGSIPHQIHLGELHAILRRQEDFYPFLKDNREKIEKILTFRIPYYVGPLARGNSRFAWMTRKSEETITPWNFEEVVDKGASAQSFIERMTNFDKNLPNEKVLPKHSLLYEYFTVYNELTKVKYVTEGMRKPAFLSGEQKKAIVDLLFKTNRKVTVKQLKEDYFKKIECFDSVEISGVEDRFNASLGTYHDLLKIIKDKDFLDNEENEDILEDIVLTLTLFEDREMIEERLKTYAHLFDDKVMKQLKRRRYTGWGRLSRKLINGIRDKQSGKTILDFLKSDGFANRNFMQLIHDDSLTFKEDIQKAQVSGQGDSLHEHIANLAGSPAIKKGILQTVKVVDELVKVMGRHKPENIVIEMARENQTTQKGQKNSRERMKRIEEGIKELGSQILKEHPVENTQLQNEKLYLYYLQNGRDMYVDQELDINRLSDYDVDAIVPQSFLKDDSIDNKVLTRSDKNRGKSDNVPSEEVVKKMKNYWRQLLNAKLITQRKFDNLTKAERGGLSELDKAGFIKRQLVETRQITKHVAQILDSRMNTKYDENDKLIREVKVITLKSKLVSDFRKDFQFYKVREINNYHHAHDAYLNAVVGTALIKKYPKLESEFVYGDYKVYDVRKMIAKSEQEIGKATAKYFFYSNIMNFFKTEITLANGEIRKRPLIETNGETGEIVWDKGRDFATVRKVLSMPQVNIVKKTEVQTGGFSKESILPKRNSDKLIARKKDWDPKKYGGFDSPTVAYSVLVVAKVEKGKSKKLKSVKELLGITIMERSSFEKNPIDFLEAKGYKEVKKDLIIKLPKYSLFELENGRKRMLASAGELQKGNELALPSKYVNFLYLASHYEKLKGSPEDNEQKQLFVEQHKHYLDEIIEQISEFSKRVILADANLDKVLSAYNKHRDKPIREQAENIIHLFTLTNLGAPAAFKYFDTTIDRKRYTSTKEVLDATLIHQSITGLYETRIDLSQLGGDNSKKRSLEDNETEIKVSRDTWNTKNMRSLEPPRSKKRIH

SEQ ID NO: 87 - protein, 1658 aa, Artificial Sequence
  chemically synthesized
MPKKKRKVSSLPLETPEQWHKLTHCNSRALSRWPNPRISAWDPRSPATLCETCQKLNPTGGGKMRTIQRGWAPNHIWQADITHYKYKQFTYALHVFVDTYSGATHASAKRGLTTQMTIEGLLEAIVHLGRPKKLNTDQGANYTSKTFVRFCQQFGVSLSHHVPYNPTSSGLVERTNGLLKLLLSKYHLDEPHLPMTQALSRALWTHNQINLLPILKTRWELHHSPPLAVISEGGETPGGGGSGGGGSGGGGSDKKYSIGLAIGTNSVGWAVITDEYKVPSKKFKVLGNTDRHSIKKNLIGALLFDSGETAEATRLKRTARRRYTRRKNRICYLQEIFSNEMAKVDDSFFHRLEESFLVEEDKKHERHPIFGNIVDEVAYHEKYPTIYHLRKKLVDSTDKADLRLIYLALAHMIKFRGHFLIEGDLNPDNSDVDKLFIQLVQTYNQLFEENPINASGVDAKAILSARLSKSRRLENLIAQLPGEKKNGLFGNLIALSLGLTPNFKSNFDLAEDAKLQLSKDTYDDDLDNLLAQIGDQYADLFLAAKNLSDAILLSDILRVNTEITKAPLSASMIKRYDEHHQDLTLLKALVRQQLPEKYKEIFFDQSKNGYAGYIDGGASQEEFYKFIKPILEKMDGTEELLVKLNREDLLRKQRTFDNGSIPHQIHLGELHAILRRQEDFYPFLKDNREKIEKILTFRIPYYVGPLARGNSRFAWMTRKSEETITPWNFEEVVDKGASAQSFIERMTNFDKNLPNEKVLPKHSLLYEYFTVYNELTKVKYVTEGMRKPAFLSGEQKKAIVDLLFKTNRKVTVKQLKEDYFKKIECFDSVEISGVEDRFNASLGTYHDLLKIIKDKDFLDNEENEDILEDIVLTLTLFEDREMIEERLKTYAHLFDDKVMKQLKRRRYTGWGRLSRKLINGIRDKQSGKTILDFLKSDGFANRNFMQLIHDDSLTFKEDIQKAQVSGQGDSLHEHIANLAGSPAIKKGILQTVKVVDELVKVMGRHKPENIVIEMARENQTTQKGQKNSRERMKRIEEGIKELGSQILKEHPVENTQLQNEKLYLYYLQNGRDMYVDQELDINRLSDYDVDAIVPQSFLKDDSIDNKVLTRSDKNRGKSDNVPSEEVVKKMKNYWRQLLNAKLITQRKFDNLTKAERGGLSELDKAGFIKRQLVETRQITKHVAQILDSRMNTKYDENDKLIREVKVITLKSKLVSDFRKDFQFYKVREINNYHHAHDAYLNAVVGTALIKKYPKLESEFVYGDYKVYDVRKMIAKSEQEIGKATAKYFFYSNIMNFFKTEITLANGEIRKRPLIETNGETGEIVWDKGRDFATVRKVLSMPQVNIVKKTEVQTGGFSKESILPKRNSDKLIARKKDWDPKKYGGFDSPTVAYSVLVVAKVEKGKSKKLKSVKELLGITIMERSSFEKNPIDFLEAKGYKEVKKDLIIKLPKYSLFELENGRKRMLASAGELQKGNELALPSKYVNFLYLASHYEKLKGSPEDNEQKQLFVEQHKHYLDEIIEQISEFSKRVILADANLDKVLSAYNKHRDKPIREQAENIIHLFTLTNLGAPAAFKYFDTTIDRKRYTSTKEVLDATLIHQSITGLYETRIDLSQLGGDNSKKRSLEDNETEIKVSRDTWNTKNMRSLEPPRSKKRIH

SEQ ID NO: 88 - protein, 1724 aa, Artificial Sequence
  chemically synthesized
MPKKKRKVSSFLEKIEPAQEEHDKYHSNVKELVFKFGLPRIVARQIVDTCDKCHQKGEAIHGQANSDLGTWQMDCTHLEGKIIIVAVHVASGFIEAEVIPQETGRQTALFLLKLAGRWPITHLHTDNGANFASQEVKMVAWWAGIEHTFGVPYNPQSQGVVEAMNHHLKNQIDRIREQANSVETIVLMAVHCMNFKRRGGIGDMTPAERLINMITTEQEIQFQQSKNSKFKNFRVYYREGRDQLWKGPGELLWKGEGAVILKVGTDIKVVPRRKAKIIKDYGGGKEVDSSSHMEDTGEAREVAGGGGSGGGGSGGGGSDKKYSIGLAIGTNSVGWAVITDEYKVPSKKFKVLGNTDRHSIKKNLIGALLFDSGETAEATRLKRTARRRYTRRKNRICYLQEIFSNEMAKVDDSFFHRLEESFLVEEDKKHERHPIFGNIVDEVAYHEKYPTIYHLRKKLVDSTDKADLRLIYLALAHMIKFRGHFLIEGDLNPDNSDVDKLFIQLVQTYNQLFEENPINASGVDAKAILSARLSKSRRLENLIAQLPGEKKNGLFGNLIALSLGLTPNFKSNFDLAEDAKLQLSKDTYDDDLDNLLAQIGDQYADLFLAAKNLSDAILLSDILRVNTEITKAPLSASMIKRYDEHHQDLTLLKALVRQQLPEKYKEIFFDQSKNGYAGYIDGGASQEEFYKFIKPILEKMDGTEELLVKLNREDLLRKQRTFDNGSIPHQIHLGELHAILRRQEDFYPFLKDNREKIEKILTFRIPYYVGPLARGNSRFAWMTRKSEETITPWNFEEVVDKGASAQSFIERMTNFDKNLPNEKVLPKHSLLYEYFTVYNELTKVKYVTEGMRKPAFLSGEQKKAIVDLLFKTNRKVTVKQLKEDYFKKIECFDSVEISGVEDRFNASLGTYHDLLKIIKDKDFLDNEENEDILEDIVLTLTLFEDREMIEERLKTYAHLFDDKVMKQLKRRRYTGWGRLSRKLINGIRDKQSGKTILDFLKSDGFANRNFMQLIHDDSLTFKEDIQKAQVSGQGDSLHEHIANLAGSPAIKKGILQTVKVVDELVKVMGRHKPENIVIEMARENQTTQKGQKNSRERMKRIEEGIKELGSQILKEHPVENTQLQNEKLYLYYLQNGRDMYVDQELDINRLSDYDVDAIVPQSFLKDDSIDNKVLTRSDKNRGKSDNVPSEEVVKKMKNYWRQLLNAKLITQRKFDNLTKAERGGLSELDKAGFIKRQLVETRQITKHVAQILDSRMNTKYDENDKLIREVKVITLKSKLVSDFRKDFQFYKVREINNYHHAHDAYLNAVVGTALIKKYPKLESEFVYGDYKVYDVRKMIAKSEQEIGKATAKYFFYSNIMNFFKTEITLANGEIRKRPLIETNGETGEIVWDKGRDFATVRKVLSMPQVNIVKKTEVQTGGFSKESILPKRNSDKLIARKKDWDPKKYGGFDSPTVAYSVLVVAKVEKGKSKKLKSVKELLGITIMERSSFEKNPIDFLEAKGYKEVKKDLIIKLPKYSLFELENGRKRMLASAGELQKGNELALPSKYVNFLYLASHYEKLKGSPEDNEQKQLFVEQHKHYLDEIIEQISEFSKRVILADANLDKVLSAYNKHRDKPIREQAENIIHLFTLTNLGAPAAFKYFDTTIDRKRYTSTKEVLDATLIHQSITGLYETRIDLSQLGGDNSKKRSLEDNETEIKVSRDTWNTKNMRSLEPPRSKKRIH

SEQ ID NO: 89 - protein, 1653 aa, Artificial Sequence
  chemically synthesized
MPKKKRKVSSFLEKIEPAQEEHDKYHSNVKELVFKFGLPRIVARQIVDTCDKCHQKGEAIHGQANSDLGTWQMDCTHLEGKIIIVAVHVASGFIEAEVIPQETGRQTALFLLKLAGRWPITHLHTDNGANFASQEVKMVAWWAGIEHTFGVPYNPQSQGVVEAMNHHLKNQIDRIREQANSVETIVLMAVHCMNFKRRGGIGDMTPAERLINMITTEQEIQFQQSKNSKFKNGGGGSGGGGSGGGGSDKKYSIGLAIGTNSVGWAVITDEYKVPSKKFKVLGNTDRHSIKKNLIGALLFDSGETAEATRLKRTARRRYTRRKNRICYLQEIFSNEMAKVDDSFFHRLEESFLVEEDKKHERHPIFGNIVDEVAYHEKYPTIYHLRKKLVDSTDKADLRLIYLALAHMIKFRGHFLIEGDLNPDNSDVDKLFIQLVQTYNQLFEENPINASGVDAKAILSARLSKSRRLENLIAQLPGEKKNGLFGNLIALSLGLTPNFKSNFDLAEDAKLQLSKDTYDDDLDNLLAQIGDQYADLFLAAKNLSDAILLSDILRVNTEITKAPLSASMIKRYDEHHQDLTLLKALVRQQLPEKYKEIFFDQSKNGYAGYIDGGASQEEFYKFIKPILEKMDGTEELLVKLNREDLLRKQRTFDNGSIPHQIHLGELHAILRRQEDFYPFLKDNREKIEKILTFRIPYYVGPLARGNSRFAWMTRKSEETITPWNFEEVVDKGASAQSFIERMTNFDKNLPNEKVLPKHSLLYEYFTVYNELTKVKYVTEGMRKPAFLSGEQKKAIVDLLFKTNRKVTVKQLKEDYFKKIECFDSVEISGVEDRFNASLGTYHDLLKIIKDKDFLDNEENEDILEDIVLTLTLFEDREMIEERLKTYAHLFDDKVMKQLKRRRYTGWGRLSRKLINGIRDKQSGKTILDFLKSDGFANRNFMQLIHDDSLTFKEDIQKAQVSGQGDSLHEHIANLAGSPAIKKGILQTVKVVDELVKVMGRHKPENIVIEMARENQTTQKGQKNSRERMKRIEEGIKELGSQILKEHPVENTQLQNEKLYLYYLQNGRDMYVDQELDINRLSDYDVDAIVPQSFLKDDSIDNKVLTRSDKNRGKSDNVPSEEVVKKMKNYWRQLLNAKLITQRKFDNLTKAERGGLSELDKAGFIKRQLVETRQITKHVAQILDSRMNTKYDENDKLIREVKVITLKSKLVSDFRKDFQFYKVREINNYHHAHDAYLNAVVGTALIKKYPKLESEFVYGDYKVYDVRKMIAKSEQEIGKATAKYFFYSNIMNFFKTEITLANGEIRKRPLIETNGETGEIVWDKGRDFATVRKVLSMPQVNIVKKTEVQTGGFSKESILPKRNSDKLIARKKDWDPKKYGGFDSPTVAYSVLVVAKVEKGKSKKLKSVKELLGITIMERSSFEKNPIDFLEAKGYKEVKKDLIIKLPKYSLFELENGRKRMLASAGELQKGNELALPSKYVNFLYLASHYEKLKGSPEDNEQKQLFVEQHKHYLDEIIEQISEFSKRVILADANLDKVLSAYNKHRDKPIREQAENIIHLFTLTNLGAPAAFKYFDTTIDRKRYTSTKEVLDATLIHQSITGLYETRIDLSQLGGDNSKKRSLEDNETEIKVSRDTWNTKNMRSLEPPRSKKRIH

SEQ ID NO: 90 - protein, 1712 aa, Artificial Sequence
  chemically synthesized
MPKKKRKVSSSSWVDRIEEAEINHEKFHSDPQYLRTEFNLPKMVAEEIRRKCPVCRIRGEQVGGQLKIGPGIWQMDCTHFDGKIILVGIHVESGYIWAQIISQETADCTVKAVLQLLSAHNVTELQTDNGPNFKNQKMEGVLNYMGVKHKFGIPGNPQSQALVENVNHTLKVWIRKFLPETTSLDNALSLAVHSLNFKRRGRIGGMAPYELLAQQESLRIQDYFSAIPQKLQAQWIYYKDQKDKKWKGPMRVEYWGQGSVLLKDEEKGYFLIPRRHIRRVPEPCALPEGDEGGGGSGGGGSGGGGSDKKYSIGLAIGTNSVGWAVITDEYKVPSKKFKVLGNTDRHSIKKNLIGALLFDSGETAEATRLKRTARRRYTRRKNRICYLQEIFSNEMAKVDDSFFHRLEESFLVEEDKKHERHPIFGNIVDEVAYHEKYPTIYHLRKKLVDSTDKADLRLIYLALAHMIKFRGHFLIEGDLNPDNSDVDKLFIQLVQTYNQLFEENPINASGVDAKAILSARLSKSRRLENLIAQLPGEKKNGLFGNLIALSLGLTPNFKSNFDLAEDAKLQLSKDTYDDDLDNLLAQIGDQYADLFLAAKNLSDAILLSDILRVNTEITKAPLSASMIKRYDEHHQDLTLLKALVRQQLPEKYKEIFFDQSKNGYAGYIDGGASQEEFYKFIKPILEKMDGTEELLVKLNREDLLRKQRTFDNGSIPHQIHLGELHAILRRQEDFYPFLKDNREKIEKILTFRIPYYVGPLARGNSRFAWMTRKSEETITPWNFEEVVDKGASAQSFIERMTNFDKNLPNEKVLPKHSLLYEYFTVYNELTKVKYVTEGMRKPAFLSGEQKKAIVDLLFKTNRKVTVKQLKEDYFKKIECFDSVEISGVEDRFNASLGTYHDLLKIIKDKDFLDNEENEDILEDIVLTLTLFEDREMIEERLKTYAHLFDDKVMKQLKRRRYTGWGRLSRKLINGIRDKQSGKTILDFLKSDGFANRNFMQLIHDDSLTFKEDIQKAQVSGQGDSLHEHIANLAGSPAIKKGILQTVKVVDELVKVMGRHKPENIVIEMARENQTTQKGQKNSRERMKRIEEGIKELGSQILKEHPVENTQLQNEKLYLYYLQNGRDMYVDQELDINRLSDYDVDAIVPQSFLKDDSIDNKVLTRSDKNRGKSDNVPSEEVVKKMKNYWRQLLNAKLITQRKFDNLTKAERGGLSELDKAGFIKRQLVETRQITKHVAQILDSRMNTKYDENDKLIREVKVITLKSKLVSDFRKDFQFYKVREINNYHHAHDAYLNAVVGTALIKKYPKLESEFVYGDYKVYDVRKMIAKSEQEIGKATAKYFFYSNIMNFFKTEITLANGEIRKRPLIETNGETGEIVWDKGRDFATVRKVLSMPQVNIVKKTEVQTGGFSKESILPKRNSDKLIARKKDWDPKKYGGFDSPTVAYSVLVVAKVEKGKSKKLKSVKELLGITIMERSSFEKNPIDFLEAKGYKEVKKDLIIKLPKYSLFELENGRKRMLASAGELQKGNELALPSKYVNFLYLASHYEKLKGSPEDNEQKQLFVEQHKHYLDEIIEQISEFSKRVILADANLDKVLSAYNKHRDKPIREQAENIIHLFTLTNLGAPAAFKYFDTTIDRKRYTSTKEVLDATLIHQSITGLYETRIDLSQLGGDNSKKRSLEDNETEIKVSRDTWNTKNMRSLEPPRSKKRIH

SEQ ID NO: 91 - protein, 1654 aa, Artificial Sequence
  chemically synthesized
MPKKKRKVSSSSWVDRIEEAEINHEKFHSDPQYLRTEFNLPKMVAEEIRRKCPVCRIRGEQVGGQLKIGPGIWQMDCTHFDGKIILVGIHVESGYIWAQIISQETADCTVKAVLQLLSAHNVTELQTDNGPNFKNQKMEGVLNYMGVKHKFGIPGNPQSQALVENVNHTLKVWIRKFLPETTSLDNALSLAVHSLNFKRRGRIGGMAPYELLAQQESLRIQDYFSAIPQKLQAGGGGSGGGGSGGGGSDKKYSIGLAIGTNSVGWAVITDEYKVPSKKFKVLGNTDRHSIKKNLIGALLFDSGETAEATRLKRTARRRYTRRKNRICYLQEIFSNEMAKVDDSFFHRLEESFLVEEDKKHERHPIFGNIVDEVAYHEKYPTIYHLRKKLVDSTDKADLRLIYLALAHMIKFRGHFLIEGDLNPDNSDVDKLFIQLVQTYNQLFEENPINASGVDAKAILSARLSKSRRLENLIAQLPGEKKNGLFGNLIALSLGLTPNFKSNFDLAEDAKLQLSKDTYDDDLDNLLAQIGDQYADLFLAAKNLSDAILLSDILRVNTEITKAPLSASMIKRYDEHHQDLTLLKALVRQQLPEKYKEIFFDQSKNGYAGYIDGGASQEEFYKFIKPILEKMDGTEELLVKLNREDLLRKQRTFDNGSIPHQIHLGELHAILRRQEDFYPFLKDNREKIEKILTFRIPYYVGPLARGNSRFAWMTRKSEETITPWNFEEVVDKGASAQSFIERMTNFDKNLPNEKVLPKHSLLYEYFTVYNELTKVKYVTEGMRKPAFLSGEQKKAIVDLLFKTNRKVTVKQLKEDYFKKIECFDSVEISGVEDRFNASLGTYHDLLKIIKDKDFLDNEENEDILEDIVLTLTLFEDREMIEERLKTYAHLFDDKVMKQLKRRRYTGWGRLSRKLINGIRDKQSGKTILDFLKSDGFANRNFMQLIHDDSLTFKEDIQKAQVSGQGDSLHEHIANLAGSPAIKKGILQTVKVVDELVKVMGRHKPENIVIEMARENQTTQKGQKNSRERMKRIEEGIKELGSQILKEHPVENTQLQNEKLYLYYLQNGRDMYVDQELDINRLSDYDVDAIVPQSFLKDDSIDNKVLTRSDKNRGKSDNVPSEEVVKKMKNYWRQLLNAKLITQRKFDNLTKAERGGLSELDKAGFIKRQLVETRQITKHVAQILDSRMNTKYDENDKLIREVKVITLKSKLVSDFRKDFQFYKVREINNYHHAHDAYLNAVVGTALIKKYPKLESEFVYGDYKVYDVRKMIAKSEQEIGKATAKYFFYSNIMNFFKTEITLANGEIRKRPLIETNGETGEIVWDKGRDFATVRKVLSMPQVNIVKKTEVQTGGFSKESILPKRNSDKLIARKKDWDPKKYGGFDSPTVAYSVLVVAKVEKGKSKKLKSVKELLGITIMERSSFEKNPIDFLEAKGYKEVKKDLIIKLPKYSLFELENGRKRMLASAGELQKGNELALPSKYVNFLYLASHYEKLKGSPEDNEQKQLFVEQHKHYLDEIIEQISEFSKRVILADANLDKVLSAYNKHRDKPIREQAENIIHLFTLTNLGAPAAFKYFDTTIDRKRYTSTKEVLDATLIHQSITGLYETRIDLSQLGGDNSKKRSLEDNETEIKVSRDTWNTKNMRSLEPPRSKKRIH

SEQ ID NO: 92 - protein, 1712 aa, Artificial Sequence
  chemically synthesized
MPKKKRKVSSTCFLENIPSATEDHERWHTSPDILVRQFHLPKRIAKEIVARCQECKRTTTSPVRGTNPRGRFLWQMDNTHWNKTIIWVAVETNSGLVEAQVIPEETALQVALCILQLIQRYTVLHLHSDNGPCFTAHRIENLCKYLGITKTTGIPYNPQSQGVVERAHRDLKDRLAAYQGDCETVEAALSLALVSLNKKRGGIGGHTPYEIYLESEHTKYQDQLEQQFSKQKIEKWCYVRNRRKEWKGPYKVLWDGDGAAVIEEEGKTALYPHRHMRFIPPPDSDIQDGSSGGGGSGGGGSGGGGSDKKYSIGLAIGTNSVGWAVITDEYKVPSKKFKVLGNTDRHSIKKNLIGALLFDSGETAEATRLKRTARRRYTRRKNRICYLQEIFSNEMAKVDDSFFHRLEESFLVEEDKKHERHPIFGNIVDEVAYHEKYPTIYHLRKKLVDSTDKADLRLIYLALAHMIKFRGHFLIEGDLNPDNSDVDKLFIQLVQTYNQLFEENPINASGVDAKAILSARLSKSRRLENLIAQLPGEKKNGLFGNLIALSLGLTPNFKSNFDLAEDAKLQLSKDTYDDDLDNLLAQIGDQYADLFLAAKNLSDAILLSDILRVNTEITKAPLSASMIKRYDEHHQDLTLLKALVRQQLPEKYKEIFFDQSKNGYAGYIDGGASQEEFYKFIKPILEKMDGTEELLVKLNREDLLRKQRTFDNGSIPHQIHLGELHAILRRQEDFYPFLKDNREKIEKILTFRIPYYVGPLARGNSRFAWMTRKSEETITPWNFEEVVDKGASAQSFIERMTNFDKNLPNEKVLPKHSLLYEYFTVYNELTKVKYVTEGMRKPAFLSGEQKKAIVDLLFKTNRKVTVKQLKEDYFKKIECFDSVEISGVEDRFNASLGTYHDLLKIIKDKDFLDNEENEDILEDIVLTLTLFEDREMIEERLKTYAHLFDDKVMKQLKRRRYTGWGRLSRKLINGIRDKQSGKTILDFLKSDGFANRNFMQLIHDDSLTFKEDIQKAQVSGQGDSLHEHIANLAGSPAIKKGILQTVKVVDELVKVMGRHKPENIVIEMARENQTTQKGQKNSRERMKRIEEGIKELGSQILKEHPVENTQLQNEKLYLYYLQNGRDMYVDQELDINRLSDYDVDAIVPQSFLKDDSIDNKVLTRSDKNRGKSDNVPSEEVVKKMKNYWRQLLNAKLITQRKFDNLTKAERGGLSELDKAGFIKRQLVETRQITKHVAQILDSRMNTKYDENDKLIREVKVITLKSKLVSDFRKDFQFYKVREINNYHHAHDAYLNAVVGTALIKKYPKLESEFVYGDYKVYDVRKMIAKSEQEIGKATAKYFFYSNIMNFFKTEITLANGEIRKRPLIETNGETGEIVWDKGRDFATVRKVLSMPQVNIVKKTEVQTGGFSKESILPKRNSDKLIARKKDWDPKKYGGFDSPTVAYSVLVVAKVEKGKSKKLKSVKELLGITIMERSSFEKNPIDFLEAKGYKEVKKDLIIKLPKYSLFELENGRKRMLASAGELQKGNELALPSKYVNFLYLASHYEKLKGSPEDNEQKQLFVEQHKHYLDEIIEQISEFSKRVILADANLDKVLSAYNKHRDKPIREQAENIIHLFTLTNLGAPAAFKYFDTTIDRKRYTSTKEVLDATLIHQSITGLYETRIDLSQLGGDNSKKRSLEDNETEIKVSRDTWNTKNMRSLEPPRSKKRIH

SEQ ID NO: 93 - protein, 1655 aa, Artificial Sequence
  chemically synthesized
MPKKKRKVSSTCFLENIPSATEDHERWHTSPDILVRQFHLPKRIAKEIVARCQECKRTTTSPVRGTNPRGRFLWQMDNTHWNKTIIWVAVETNSGLVEAQVIPEETALQVALCILQLIQRYTVLHLHSDNGPCFTAHRIENLCKYLGITKTTGIPYNPQSQGVVERAHRDLKDRLAAYQGDCETVEAALSLALVSLNKKRGGIGGHTPYEIYLESEHTKYQDQLEQQFSKQKIEGGGGSGGGGSGGGGSDKKYSIGLAIGTNSVGWAVITDEYKVPSKKFKVLGNTDRHSIKKNLIGALLFDSGETAEATRLKRTARRRYTRRKNRICYLQEIFSNEMAKVDDSFFHRLEESFLVEEDKKHERHPIFGNIVDEVAYHEKYPTIYHLRKKLVDSTDKADLRLIYLALAHMIKFRGHFLIEGDLNPDNSDVDKLFIQLVQTYNQLFEENPINASGVDAKAILSARLSKSRRLENLIAQLPGEKKNGLFGNLIALSLGLTPNFKSNFDLAEDAKLQLSKDTYDDDLDNLLAQIGDQYADLFLAAKNLSDAILLSDILRVNTEITKAPLSASMIKRYDEHHQDLTLLKALVRQQLPEKYKEIFFDQSKNGYAGYIDGGASQEEFYKFIKPILEKMDGTEELLVKLNREDLLRKQRTFDNGSIPHQIHLGELHAILRRQEDFYPFLKDNREKIEKILTFRIPYYVGPLARGNSRFAWMTRKSEETITPWNFEEVVDKGASAQSFIERMTNFDKNLPNEKVLPKHSLLYEYFTVYNELTKVKYVTEGMRKPAFLSGEQKKAIVDLLFKTNRKVTVKQLKEDYFKKIECFDSVEISGVEDRFNASLGTYHDLLKIIKDKDFLDNEENEDILEDIVLTLTLFEDREMIEERLKTYAHLFDDKVMKQLKRRRYTGWGRLSRKLINGIRDKQSGKTILDFLKSDGFANRNFMQLIHDDSLTFKEDIQKAQVSGQGDSLHEHIANLAGSPAIKKGILQTVKVVDELVKVMGRHKPENIVIEMARENQTTQKGQKNSRERMKRIEEGIKELGSQILKEHPVENTQLQNEKLYLYYLQNGRDMYVDQELDINRLSDYDVDAIVPQSFLKDDSIDNKVLTRSDKNRGKSDNVPSEEVVKKMKNYWRQLLNAKLITQRKFDNLTKAERGGLSELDKAGFIKRQLVETRQITKHVAQILDSRMNTKYDENDKLIREVKVITLKSKLVSDFRKDFQFYKVREINNYHHAHDAYLNAVVGTALIKKYPKLESEFVYGDYKVYDVRKMIAKSEQEIGKATAKYFFYSNIMNFFKTEITLANGEIRKRPLIETNGETGEIVWDKGRDFATVRKVLSMPQVNIVKKTEVQTGGFSKESILPKRNSDKLIARKKDWDPKKYGGFDSPTVAYSVLVVAKVEKGKSKKLKSVKELLGITIMERSSFEKNPIDFLEAKGYKEVKKDLIIKLPKYSLFELENGRKRMLASAGELQKGNELALPSKYVNFLYLASHYEKLKGSPEDNEQKQLFVEQHKHYLDEIIEQISEFSKRVILADANLDKVLSAYNKHRDKPIREQAENIIHLFTLTNLGAPAAFKYFDTTIDRKRYTSTKEVLDATLIHQSITGLYETRIDLSQLGGDNSKKRSLEDNETEIKVSRDTWNTKNMRSLEPPRSKKRIH

SEQ ID NO: 94 - protein, 1698 aa, Artificial Sequence
  chemically synthesized
MPKKKRKVSSNVHTSESTRKYPYPFIHRMLAHANAQTIRYSLKNNTITYFNESDVDWSSAIDYQCPDCLIGKSTKHRHIKGSRLKYQNSYEPFQYLHTDIFGPVHNLPKSAPSYFISFTDETTKFRWVYPLHDRREDSILDVFTTILAFIKNQFQASVLVIQMDRGSEYTNRTLHKFLEKNGITPCYTTTADSRAHGVAERLNRTLLDDCRTQLQCSGLPNHLWFSAIEFSTIVRNSLASPKSKKSARQHAGLAGLDISTLLPFGQPVIVNDHNPNSGGGGSGGGGSGGGGSDKKYSIGLAIGTNSVGWAVITDEYKVPSKKFKVLGNTDRHSIKKNLIGALLFDSGETAEATRLKRTARRRYTRRKNRICYLQEIFSNEMAKVDDSFFHRLEESFLVEEDKKHERHPIFGNIVDEVAYHEKYPTIYHLRKKLVDSTDKADLRLIYLALAHMIKFRGHFLIEGDLNPDNSDVDKLFIQLVQTYNQLFEENPINASGVDAKAILSARLSKSRRLENLIAQLPGEKKNGLFGNLIALSLGLTPNFKSNFDLAEDAKLQLSKDTYDDDLDNLLAQIGDQYADLFLAAKNLSDAILLSDILRVNTEITKAPLSASMIKRYDEHHQDLTLLKALVRQQLPEKYKEIFFDQSKNGYAGYIDGGASQEEFYKFIKPILEKMDGTEELLVKLNREDLLRKQRTFDNGSIPHQIHLGELHAILRRQEDFYPFLKDNREKIEKILTFRIPYYVGPLARGNSRFAWMTRKSEETITPWNFEEVVDKGASAQSFIERMTNFDKNLPNEKVLPKHSLLYEYFTVYNELTKVKYVTEGMRKPAFLSGEQKKAIVDLLFKTNRKVTVKQLKEDYFKKIECFDSVEISGVEDRFNASLGTYHDLLKIIKDKDFLDNEENEDILEDIVLTLTLFEDREMIEERLKTYAHLFDDKVMKQLKRRRYTGWGRLSRKLINGIRDKQSGKTILDFLKSDGFANRNFMQLIHDDSLTFKEDIQKAQVSGQGDSLHEHIANLAGSPAIKKGILQTVKVVDELVKVMGRHKPENIVIEMARENQTTQKGQKNSRERMKRIEEGIKELGSQILKEHPVENTQLQNEKLYLYYLQNGRDMYVDQELDINRLSDYDVDAIVPQSFLKDDSIDNKVLTRSDKNRGKSDNVPSEEVVKKMKNYWRQLLNAKLITQRKFDNLTKAERGGLSELDKAGFIKRQLVETRQITKHVAQILDSRMNTKYDENDKLIREVKVITLKSKLVSDFRKDFQFYKVREINNYHHAHDAYLNAVVGTALIKKYPKLESEFVYGDYKVYDVRKMIAKSEQEIGKATAKYFFYSNIMNFFKTEITLANGEIRKRPLIETNGETGEIVWDKGRDFATVRKVLSMPQVNIVKKTEVQTGGFSKESILPKRNSDKLIARKKDWDPKKYGGFDSPTVAYSVLVVAKVEKGKSKKLKSVKELLGITIMERSSFEKNPIDFLEAKGYKEVKKDLIIKLPKYSLFELENGRKRMLASAGELQKGNELALPSKYVNFLYLASHYEKLKGSPEDNEQKQLFVEQHKHYLDEIIEQISEFSKRVILADANLDKVLSAYNKHRDKPIREQAENIIHLFTLTNLGAPAAFKYFDTTIDRKRYTSTKEVLDATLIHQSITGLYETRIDLSQLGGDNSKKRSLEDNETEIKVSRDTWNTKNMRSLEPPRSKKRIH

SEQ ID NO: 95 - protein, 1718 aa, Artificial Sequence
  chemically synthesized
MPKKKRKVSSKYVFIEKHQAEFSIKAMCRVLRVARSGWYTWCQRRTRISTRQQFRQHCDSVVLAAFTRSKQRYGAPRLTDELRAQGYPFNVKTVAASLRRQGLRAKASRKFSPVSYRAHGLPVSENLLEQDFYASGPNQKWAGDITYLRTDEGWLYLAVVIDLWSRAVIGWSMSPRMTAQLACDALQMALWRRKRPRNVIVHTDRGGQYCSADYQAQLKRHNLRGSMSAKGCCYDNACVESFFHSLKVECIHGEHFISREIMRATVFNYIECDYNRWRRHSWCGGLSPEQFENKNLAGGGGSGGGGSGGGGSDKKYSIGLAIGTNSVGWAVITDEYKVPSKKFKVLGNTDRHSIKKNLIGALLFDSGETAEATRLKRTARRRYTRRKNRICYLQEIFSNEMAKVDDSFFHRLEESFLVEEDKKHERHPIFGNIVDEVAYHEKYPTIYHLRKKLVDSTDKADLRLIYLALAHMIKFRGHFLIEGDLNPDNSDVDKLFIQLVQTYNQLFEENPINASGVDAKAILSARLSKSRRLENLIAQLPGEKKNGLFGNLIALSLGLTPNFKSNFDLAEDAKLQLSKDTYDDDLDNLLAQIGDQYADLFLAAKNLSDAILLSDILRVNTEITKAPLSASMIKRYDEHHQDLTLLKALVRQQLPEKYKEIFFDQSKNGYAGYIDGGASQEEFYKFIKPILEKMDGTEELLVKLNREDLLRKQRTFDNGSIPHQIHLGELHAILRRQEDFYPFLKDNREKIEKILTFRIPYYVGPLARGNSRFAWMTRKSEETITPWNFEEVVDKGASAQSFIERMTNFDKNLPNEKVLPKHSLLYEYFTVYNELTKVKYVTEGMRKPAFLSGEQKKAIVDLLFKTNRKVTVKQLKEDYFKKIECFDSVEISGVEDRFNASLGTYHDLLKIIKDKDFLDNEENEDILEDIVLTLTLFEDREMIEERLKTYAHLFDDKVMKQLKRRRYTGWGRLSRKLINGIRDKQSGKTILDFLKSDGFANRNFMQLIHDDSLTFKEDIQKAQVSGQGDSLHEHIANLAGSPAIKKGILQTVKVVDELVKVMGRHKPENIVIEMARENQTTQKGQKNSRERMKRIEEGIKELGSQILKEHPVENTQLQNEKLYLYYLQNGRDMYVDQELDINRLSDYDVDAIVPQSFLKDDSIDNKVLTRSDKNRGKSDNVPSEEVVKKMKNYWRQLLNAKLITQRKFDNLTKAERGGLSELDKAGFIKRQLVETRQITKHVAQILDSRMNTKYDENDKLIREVKVITLKSKLVSDFRKDFQFYKVREINNYHHAHDAYLNAVVGTALIKKYPKLESEFVYGDYKVYDVRKMIAKSEQEIGKATAKYFFYSNIMNFFKTEITLANGEIRKRPLIETNGETGEIVWDKGRDFATVRKVLSMPQVNIVKKTEVQTGGFSKESILPKRNSDKLIARKKDWDPKKYGGFDSPTVAYSVLVVAKVEKGKSKKLKSVKELLGITIMERSSFEKNPIDFLEAKGYKEVKKDLIIKLPKYSLFELENGRKRMLASAGELQKGNELALPSKYVNFLYLASHYEKLKGSPEDNEQKQLFVEQHKHYLDEIIEQISEFSKRVILADANLDKVLSAYNKHRDKPIREQAENIIHLFTLTNLGAPAAFKYFDTTIDRKRYTSTKEVLDATLIHQSITGLYETRIDLSQLGGDNSKKRSLEDNETEIKVSRDTWNTKNMRSLEPPRSKKRIH

SEQ ID NO: 96 - protein, 1606 aa, Artificial Sequence
  chemically synthesized
MPKKKRKVSSVSENLLEQDFYASGPNQKWAGDITYLRTDEGWLYLAVVIDLWSRAVIGWSMSPRMTAQLACDALQMALWRRKRPRNVIVHTDRGGQYCSADYQAQLKRHNLRGSMSAKGCCYDNACVESFFHSLKVECIHGEHFISREIMRATVFNYIECDYNRWRRHSWCGGLSPEQFENKNLAGGGGSGGGGSGGGGSDKKYSIGLAIGTNSVGWAVITDEYKVPSKKFKVLGNTDRHSIKKNLIGALLFDSGETAEATRLKRTARRRYTRRKNRICYLQEIFSNEMAKVDDSFFHRLEESFLVEEDKKHERHPIFGNIVDEVAYHEKYPTIYHLRKKLVDSTDKADLRLIYLALAHMIKFRGHFLIEGDLNPDNSDVDKLFIQLVQTYNQLFEENPINASGVDAKAILSARLSKSRRLENLIAQLPGEKKNGLFGNLIALSLGLTPNFKSNFDLAEDAKLQLSKDTYDDDLDNLLAQIGDQYADLFLAAKNLSDAILLSDILRVNTEITKAPLSASMIKRYDEHHQDLTLLKALVRQQLPEKYKEIFFDQSKNGYAGYIDGGASQEEFYKFIKPILEKMDGTEELLVKLNREDLLRKQRTFDNGSIPHQIHLGELHAILRRQEDFYPFLKDNREKIEKILTFRIPYYVGPLARGNSRFAWMTRKSEETITPWNFEEVVDKGASAQSFIERMTNFDKNLPNEKVLPKHSLLYEYFTVYNELTKVKYVTEGMRKPAFLSGEQKKAIVDLLFKTNRKVTVKQLKEDYFKKIECFDSVEISGVEDRFNASLGTYHDLLKIIKDKDFLDNEENEDILEDIVLTLTLFEDREMIEERLKTYAHLFDDKVMKQLKRRRYTGWGRLSRKLINGIRDKQSGKTILDFLKSDGFANRNFMQLIHDDSLTFKEDIQKAQVSGQGDSLHEHIANLAGSPAIKKGILQTVKVVDELVKVMGRHKPENIVIEMARENQTTQKGQKNSRERMKRIEEGIKELGSQILKEHPVENTQLQNEKLYLYYLQNGRDMYVDQELDINRLSDYDVDAIVPQSFLKDDSIDNKVLTRSDKNRGKSDNVPSEEVVKKMKNYWRQLLNAKLITQRKFDNLTKAERGGLSELDKAGFIKRQLVETRQITKHVAQILDSRMNTKYDENDKLIREVKVITLKSKLVSDFRKDFQFYKVREINNYHHAHDAYLNAVVGTALIKKYPKLESEFVYGDYKVYDVRKMIAKSEQEIGKATAKYFFYSNIMNFFKTEITLANGEIRKRPLIETNGETGEIVWDKGRDFATVRKVLSMPQVNIVKKTEVQTGGFSKESILPKRNSDKLIARKKDWDPKKYGGFDSPTVAYSVLVVAKVEKGKSKKLKSVKELLGITIMERSSFEKNPIDFLEAKGYKEVKKDLIIKLPKYSLFELENGRKRMLASAGELQKGNELALPSKYVNFLYLASHYEKLKGSPEDNEQKQLFVEQHKHYLDEIIEQISEFSKRVILADANLDKVLSAYNKHRDKPIREQAENIIHLFTLTNLGAPAAFKYFDTTIDRKRYTSTKEVLDATLIHQSITGLYETRIDLSQLGGDNSKKRSLEDNETEIKVSRDTWNTKNMRSLEPPRSKKRIH

SEQ ID NO: 97 - protein, 1672 aa, Artificial Sequence
  chemically synthesized
MDYKDHDGDYKDHDIDYKDDDDKGGNSKKRSLEDNETEIKVSRDTWNTKNMRSLEPPRSKKRIHGGDKKYSIGLDIGTNSVGWAVITDEYKVPSKKFKVLGNTDRHSIKKNLIGALLFDSGETAEATRLKRTARRRYTRRKNRICYLQEIFSNEMAKVDDSFFHRLEESFLVEEDKKHERHPIFGNIVDEVAYHEKYPTIYHLRKKLVDSTDKADLRLIYLALAHMIKFRGHFLIEGDLNPDNSDVDKLFIQLVQTYNQLFEENPINASGVDAKAILSARLSKSRRLENLIAQLPGEKKNGLFGNLIALSLGLTPNFKSNFDLAEDAKLQLSKDTYDDDLDNLLAQIGDQYADLFLAAKNLSDAILLSDILRVNTEITKAPLSASMIKRYDEHHQDLTLLKALVRQQLPEKYKEIFFDQSKNGYAGYIDGGASQEEFYKFIKPILEKMDGTEELLVKLNREDLLRKQRTFDNGSIPHQIHLGELHAILRRQEDFYPFLKDNREKIEKILTFRIPYYVGPLARGNSRFAWMTRKSEETITPWNFEEVVDKGASAQSFIERMTNFDKNLPNEKVLPKHSLLYEYFTVYNELTKVKYVTEGMRKPAFLSGEQKKAIVDLLFKTNRKVTVKQLKEDYFKKIECFDSVEISGVEDRFNASLGTYHDLLKIIKDKDFLDNEENEDILEDIVLTLTLFEDREMIEERLKTYAHLFDDKVMKQLKRRRYTGWGRLSRKLINGIRDKQSGKTILDFLKSDGFANRNFMQLIHDDSLTFKEDIQKAQVSGQGDSLHEHIANLAGSPAIKKGILQTVKVVDELVKVMGRHKPENIVIEMARENQTTQKGQKNSRERMKRIEEGIKELGSQILKEHPVENTQLQNEKLYLYYLQNGRDMYVDQELDINRLSDYDVDHIVPQSFLKDDSIDNKVLTRSDKNRGKSDNVPSEEVVKKMKNYWRQLLNAKLITQRKFDNLTKAERGGLSELDKAGFIKRQLVETRQITKHVAQILDSRMNTKYDENDKLIREVKVITLKSKLVSDFRKDFQFYKVREINNYHHAHDAYLNAVVGTALIKKYPKLESEFVYGDYKVYDVRKMIAKSEQEIGKATAKYFFYSNIMNFFKTEITLANGEIRKRPLIETNGETGEIVWDKGRDFATVRKVLSMPQVNIVKKTEVQTGGFSKESILPKRNSDKLIARKKDWDPKKYGGFDSPTVAYSVLVVAKVEKGKSKKLKSVKELLGITIMERSSFEKNPIDFLEAKGYKEVKKDLIIKLPKYSLFELENGRKRMLASAGELQKGNELALPSKYVNFLYLASHYEKLKGSPEDNEQKQLFVEQHKHYLDEIIEQISEFSKRVILADANLDKVLSAYNKHRDKPIREQAENIIHLFTLTNLGAPAAFKYFDTTIDRKRYTSTKEVLDATLIHQSITGLYETRIDLSQLGGDGGGGSGGGGSGGGGSLEFLDGIDKAQDEHEKYHSNWRAMASDFNLPPVVAKEIVASCDKCQLKGEAMHGQVDCSPGIWQLDCTHLEGKVILVAVHVASGYIEAEVIPAETGQETAYFLLKLAGRWPVKTIHTDNGSNFTGATVRAACWWAGIKQEFGIPYNPQSQGVVESMNKELKKIIGQVRDQAEHLKTAVQMAVFIHNFKRKGGIGGYSAGERIVDIIATDIQTKELQKQITKIQN

SEQ ID NO: 98 - protein, 1384 aa, Artificial Sequence
  chemically synthesized
MPKKKRKVSSFLDGIDKAQDEHEKYHSNWRAMASDFNLPPVVAKEIVASCDKCQLKGEAMHGQVDCSPGIWQLDCTHLEGKVILVAVHVASGYIEAEVIPAETGQETAYFLLKLAGRWPVKTIHTDNGSNFTGATVRAACWWAGIKQEFGIPYNPQSQGVVESMNKELKKIIGQVRDQAEHLKTAVQMAVFIHNFKRKGGIGGYSAGERIVDIIATDIQTKELQKQITKIQNLKGGGGSGGGGSGGGGSGGGGSGGGGSGGGGSTRGKRNYILGLAIGITSVGYGIIDYETRDVIDAGVRLFKEANVENNEGRRSKRGARRLKRRRRHRIQRVKKLLFDYNLLTDHSELSGINPYEARVKGLSQKLSEEEFSAALLHLAKRRGVHNVNEVEEDTGNELSTKEQISRNSKALEEKYVAELQLERLKKDGEVRGSINRFKTSDYVKEAKQLLKVQKAYHQLDQSFIDTYIDLLETRRTYYEGPGEGSPFGWKDIKEWYEMLMGHCTYFPEELRSVKYAYNADLYNALNDLNNLVITRDENEKLEYYEKFQIIENVFKQKKKPTLKQIAKEILVNEEDIKGYRVTSTGKPEFTNLKVYHDIKDITARKEIIENAELLDQIAKILTIYQSSEDIQEELTNLNSELTQEEIEQISNLKGYTGTHNLSLKAINLILDELWHTNDNQIAIFNRLKLVPKKVDLSQQKEIPTTLVDDFILSPVVKRSFIQSIKVINAIIKKYGLPNDIIIELAREKNSKDAQKMINEMQKRNRQTNERIEEIIRTTGKENAKYLIEKIKLHDMQEGKCLYSLEAIPLEDLLNNPFNYEVDHIIPRSVSFDNSFNNKVLVKQEEASKKGNRTPFQYLSSSDSKISYETFKKHILNLAKGKGRISKTKKEYLLEERDINRFSVQKDFINRNLVDTRYATRGLMNLLRSYFRVNNLDVKVKSINGGFTSFLRRKWKFKKERNKGYKHHAEDALIIANADFIFKEWKKLDKAKKVMENQMFEEKQAESMPEIETEQEYKEIFITPHQIKHIKDFKDYKYSHRVDKKPNRELINDTLYSTRKDDKGNTLIVNNLNGLYDKDNDKLKKLINKSPEKLLMYHHDPQTYQKLKLIMEQYGDEKNPLYKYYEETGNYLTKYSKKDNGPVIKKIKYYGNKLNAHLDITDDYPNSRNKVVKLSLKPYRFDVYLDNGVYKFVTVKNLDVIKKENYYEVNSKCYEEAKKLKKISNQAEFIASFYNNDLIKINGELYRVIGVNNDLLNRIEVNMIDITYREYLENMNDKRPPRIIKTIASKTQSIKKYSTDILGNLYEVKSKKHPQIIKKGGSNSKKRSLEDNETEIKVSRDTWNTKNMRSLEPPRSKKRIHLEDYKDHDGDYKDHDIDYKDDDDK

SEQ ID NO: 99 - DNA, 864 bp, Artificial Sequence
  chemically synthesized
tttttggacggtattgacaaagctcaggacgaacatgaaaagtaccactctaactggagagctatggcctccgattttaatcttccgccggtggtagcgaaagaaatcgttgccagttgcgacaaatgccaattgaagggagaagccatgcatggtcaagtggattgttcccccggaatatggcaactcgattgcacgcatctggaaggcaaggtcatcctcgtagcggtacatgttgcttctggatatattgaggccgaggttataccggcagaaacgggccaagaaacagcgtactttctcctgaagcttgcgggacgctggcctgtgaaaacgattcataccgacaacggttctaactttaccggagcaacagtacgggccgcatgctggtgggccggtataaagcaggaatttgggattccatacaatccgcaaagtcaaggtgtcgtcgagtctatgaataaggaactcaaaaagataattggtcaggttagagatcaagccgaacatctcaagacggcggtccaaatggcagtttttattcacaactttaagaggaaaggtgggattggtggctattcagcaggggagcgaatagtggacataatagcaaccgacatacagactaaggagttgcaaaagcagatcacaaagattcaaaattttcgggtttattaccgcgatagccggaatccgctttggaaaggtcctgcgaaacttttgtggaagggcgagggagctgtcgtcattcaggataacagcgacatcaaggtcgttccgcggcgcaaggcgaaaatcatacgggactatggtaaacaaatggccggggatgactgcgttgcgtcccggcaagacgaggat

SEQ ID NO: 100 - DNA, 666 bp, Artificial Sequence
  chemically synthesized
tttttggacggtattgacaaagctcaggacgaacatgaaaagtaccactctaactggagagctatggcctccgattttaatcttccgccggtggtagcgaaagaaatcgttgccagttgcgacaaatgccaattgaagggagaagccatgcatggtcaagtggattgttcccccggaatatggcaactcgattgcacgcatctggaaggcaaggtcatcctcgtagcggtacatgttgcttctggatatattgaggccgaggttataccggcagaaacgggccaagaaacagcgtactttctcctgaagcttgcgggacgctggcctgtgaaaacgattcataccgacaacggttctaactttaccggagcaacagtacgggccgcatgctggtgggccggtataaagcaggaatttgggattccatacaatccgcaaagtcaaggtgtcgtcgagtctatgaataaggaactcaaaaagataattggtcaggttagagatcaagccgaacatctcaagacggcggtccaaatggcagtttttattcacaactttaagaggaaaggtgggattggtggctattcagcaggggagcgaatagtggacataatagcaaccgacatacagactaaggagttgcaaaagcagatcacaaagattcaaaat

SEQ ID NO: 101 - DNA, 1377 bp, Artificial Sequence
  chemically synthesized
ttcctggatggcattgataaagcgcaggatgagcacgaaaaatatcactctaactggcgcgctatggcaagcgatttcaacctcccccccgtggtggctaaagagattgtcgcgtcctgcgacaagtgccaacttaagggtgaagctatgcacggtcaagtcgactgctctccagggatatggcaattggactgcacacaccttgaaggcaaagtaatactggttgccgtacacgtggcttctggatatattgaagccgaggtgattcctgcggaaacaggacaggagacagcctactttctgctgaagctcgcggggagatggccagtcaagacaattcacacagacaatggctctaactttacgggagctacagtgcgggcagcctgctggtgggcggggatcaagcaagaatttggtatcccctacaacccgcagtcccagggtgtggttgagtctatgaataaggaactgaaaaaaatcattggacaggttcgcgatcaagcggagcacctgaagactgcggtacaaatggctgtatttatccataactttaagaggaaaggtggcattggtgggtactcagcgggtgagcggatcgtagacattatagcgacagacatacagacgaaagagcttcagaaacaaataaccaaaatccagaatggcgggggaggatctggcggtggcggctctggtggcggcgggagttttctggacggaattgataaggcacaggacgaacacgaaaagtatcactctaattggagagcgatggcaagtgattttaacttgccccctgttgtagctaaggaaatagttgcaagttgcgataagtgccagcttaaaggcgaggcaatgcacggccaggtcgactgttcacctgggatttggcagctcgactgcactcatcttgaggggaaagtaatccttgtggcagtgcacgtagcgagtggttacatcgaagcagaagtaatacctgctgagacgggacaagagactgcctatttcctgctcaaacttgctggaagatggcccgtcaagacaattcatactgataacggaagcaattttacgggtgcgacagttagagcagcttgttggtgggctgggataaaacaggagtttgggattccatataacccgcaatcacagggggtagtggagagtatgaacaaggagcttaagaaaattattggtcaagtcagagaccaagcggagcatctgaaaactgctgtgcagatggccgtctttatacacaattttaaaaggaagggagggatcggcggttacagcgccggtgagagaatagtagatatcattgccaccgatatccaaaccaaagaacttcaaaaacaaattaccaaaatacaaaat

SEQ ID NO: 102 - DNA, 864 bp, Artificial Sequence
  chemically synthesized
tttttggacggtattgacaaagctcaggacgaacatgaaaagtaccactctaactggagagctatggcctccgattttaatcttccgccggtggtagcgaaagaaatcgttgccagttgcgacaaatgccaattgaagggagaagccatgcatggtcaagtggattgttcccccggaatatggcaactcgattgcacgcatctggaaggcaaggtcatcctcgtagcggtacatgttgcttctggatatattggcgccgaggttataccggcagaaacgggccaagaaacagcgtactttctcctgaagcttgcgggacgctggcctgtgaaaacgattcataccgacaacggttctaactttaccggagcaacagtacgggccgcatgctggtgggccggtataaagcaggaatttgggattccatacaatccgcaaagtcaaggtgtcgtcgagtctatgaataaggaactcaaaaagataattggtcaggttagagatcaagccgaacatctcaagacggcggtccaaatggcagtttttattcacaactttaagaggaaaggtgggattggtggctattcagcaggggagcgaatagtggacataatagcaaccgacatacagactaaggagttgcaaaagcagatcacaaagattcaaaattttcgggtttattaccgcgatagccggaatccgctttggaaaggtcctgcgaaacttttgtggaagggcgagggagctgtcgtcattcaggataacagcgacatcaaggtcgttccgcggcgcaaggcgaaaatcatacgggactatggtaaacaaatggccggggatgactgcgttgcgtcccggcaagacgaggat

SEQ ID NO: 103 - DNA, 666 bp, Artificial Sequence
  chemically synthesized
tttttggacggtattgacaaagctcaggacgaacatgaaaagtaccactctaactggagagctatggcctccgattttaatcttccgccggtggtagcgaaagaaatcgttgccagttgcgacaaatgccaattgaagggagaagccatgcatggtcaagtggattgttcccccggaatatggcaactcgattgcacgcatctggaaggcaaggtcatcctcgtagcggtacatgttgcttctggatatattggcgccgaggttataccggcagaaacgggccaagaaacagcgtactttctcctgaagcttgcgggacgctggcctgtgaaaacgattcataccgacaacggttctaactttaccggagcaacagtacgggccgcatgctggtgggccggtataaagcaggaatttgggattccatacaatccgcaaagtcaaggtgtcgtcgagtctatgaataaggaactcaaaaagataattggtcaggttagagatcaagccgaacatctcaagacggcggtccaaatggcagtttttattcacaactttaagaggaaaggtgggattggtggctattcagcaggggagcgaatagtggacataatagcaaccgacatacagactaaggagttgcaaaagcagatcacaaagattcaaaat

SEQ ID NO: 104 - DNA, 864 bp, Artificial Sequence
  chemically synthesized
tttttggacggtattgacaaagctcaggacgaacatgaaaagtaccactctaactggagagctatggcctccgattttaatcttccgccggtggtagcgaaagaaatcgttgccagttgcgacaaatgccaattgaagggagaagccatgcatggtcaagtggattgttcccccggaatatggcaactcgattgcacgcatctggaaggcaaggtcatcctcgtagcggtacatgttgcttctggatatattttcgccgaggttataccggcagaaacgggccaagaaacagcgtactttctcctgaagcttgcgggacgctggcctgtgaaaacgattcataccgacaacggttctaactttaccggagcaacagtacgggccgcatgctggtgggccggtataaagcaggaatttgggattccatacaatccgcaaagtcaaggtgtcgtcgagtctatgaataaggaactcaaaaagataattggtcaggttagagatcaagccgaacatctcaagacggcggtccaaatggcagtttttattcacaactttaagaggaaaggtgggattggtggctattcagcaggggagcgaatagtggacataatagcaaccgacatacagactaaggagttgcaaaagcagatcacaaagattcaaaattttcgggtttattaccgcgatagccggaatccgctttggaaaggtcctgcgaaacttttgtggaagggcgagggagctgtcgtcattcaggataacagcgacatcaaggtcgttccgcggcgcaaggcgaaaatcatacgggactatggtaaacaaatggccggggatgactgcgttgcgtcccggcaagacgaggat

SEQ ID NO: 105 - DNA, 666 bp, Artificial Sequence
  chemically synthesized
tttttggacggtattgacaaagctcaggacgaacatgaaaagtaccactctaactggagagctatggcctccgattttaatcttccgccggtggtagcgaaagaaatcgttgccagttgcgacaaatgccaattgaagggagaagccatgcatggtcaagtggattgttcccccggaatatggcaactcgattgcacgcatctggaaggcaaggtcatcctcgtagcggtacatgttgcttctggatatattttcgccgaggttataccggcagaaacgggccaagaaacagcgtactttctcctgaagcttgcgggacgctggcctgtgaaaacgattcataccgacaacggttctaactttaccggagcaacagtacgggccgcatgctggtgggccggtataaagcaggaatttgggattccatacaatccgcaaagtcaaggtgtcgtcgagtctatgaataaggaactcaaaaagataattggtcaggttagagatcaagccgaacatctcaagacggcggtccaaatggcagtttttattcacaactttaagaggaaaggtgggattggtggctattcagcaggggagcgaatagtggacataatagcaaccgacatacagactaaggagttgcaaaagcagatcacaaagattcaaaat

SEQ ID NO: 106 - DNA, 864 bp, Artificial Sequence
  chemically synthesized
tttttggacggtattgacaaagctcaggacgaacatgaaaagtaccactctaactggagagctatggcctccgattttaatcttccgccggtggtagcgaaagaaatcgttgccagttgcgacaaatgccaattgaagggagaagccatgcatggtcaagtggattgttcccccggaatatggcaactcgattgcacgcatctggaaggcaaggtcatcctcgtagcggtacatgttgcttctggatatattgaggccgaggttataccggcagaaacgggccaagaaacagcgtactttctcctgaagcttgcgggacgctggcctgtgaaaacgattcataccaacaacggttctaactttaccggagcaacagtacgggccgcatgctggtgggccggtataaagcaggaatttgggattccatacaatccgcaaagtcaaggtgtcgtcgagtctatgaataaggaactcaaaaagataattggtcaggttagagatcaagccgaacatctcaagacggcggtccaaatggcagtttttattcacaactttaagaggaaaggtgggattggtggctattcagcaggggagcgaatagtggacataatagcaaccgacatacagactaaggagttgcaaaagcagatcacaaagattcaaaattttcgggtttattaccgcgatagccggaatccgctttggaaaggtcctgcgaaacttttgtggaagggcgagggagctgtcgtcattcaggataacagcgacatcaaggtcgttccgcggcgcaaggcgaaaatcatacgggactatggtaaacaaatggccggggatgactgcgttgcgtcccggcaagacgaggat

SEQ ID NO: 107 - DNA, 666 bp, Artificial Sequence
  chemically synthesized
tttttggacggtattgacaaagctcaggacgaacatgaaaagtaccactctaactggagagctatggcctccgattttaatcttccgccggtggtagcgaaagaaatcgttgccagttgcgacaaatgccaattgaagggagaagccatgcatggtcaagtggattgttcccccggaatatggcaactcgattgcacgcatctggaaggcaaggtcatcctcgtagcggtacatgttgcttctggatatattgaggccgaggttataccggcagaaacgggccaagaaacagcgtactttctcctgaagcttgcgggacgctggcctgtgaaaacgattcataccaacaacggttctaactttaccggagcaacagtacgggccgcatgctggtgggccggtataaagcaggaatttgggattccatacaatccgcaaagtcaaggtgtcgtcgagtctatgaataaggaactcaaaaagataattggtcaggttagagatcaagccgaacatctcaagacggcggtccaaatggcagtttttattcacaactttaagaggaaaggtgggattggtggctattcagcaggggagcgaatagtggacataatagcaaccgacatacagactaaggagttgcaaaagcagatcacaaagattcaaaat

SEQ ID NO: 108 - DNA, 864 bp, Artificial Sequence
  chemically synthesized
tttttggacggtattgacaaagctcaggacgaacatgaaaagtaccactctaactggagagctatggcctccgattttaatcttccgccggtggtagcgaaagaaatcgttgccagttgcgacaaatgccaattgaagggagaagccatgcatggtcaagtggattgttcccccggaatatggcaactcgattgcacgcatctggaaggcaaggtcatcctcgtagcggtacatgttgcttctggatatattgaggccgaggttataccggcagaaacgggccaagaaacagcgtactttctcctgaagcttgcgggacgctggcctgtgaaaacgattcataccgacaacggttctaactttaccggagcaacagtacgggccgcatgctggtgggccggtataaagcaggaatttgggattccatacaatccgcaaagtcaaggtgtcgtcgagtctatgaataaggaactcaaaaagataattggtcaggttagagatcaagccgaacatctcaagacggcggtccaaatggcagtttttattcacaacaagaagaggaaaggtgggattggtggctattcagcaggggagcgaatagtggacataatagcaaccgacatacagactaaggagttgcaaaagcagatcacaaagattcaaaattttcgggtttattaccgcgatagccggaatccgctttggaaaggtcctgcgaaacttttgtggaagggcgagggagctgtcgtcattcaggataacagcgacatcaaggtcgttccgcggcgcaaggcgaaaatcatacgggactatggtaaacaaatggccggggatgacagcgttgcgtcccggcaagacgaggat

SEQ ID NO: 109 - DNA, 864 bp, Artificial Sequence
  chemically synthesized
tttttggacggtattgacaaagctcaggacgaacatgaaaagtaccactctaactggagagctatggcctccgattttaatcttccgccggtggtagcgaaagaaatcgttgccagttgcgacaaatgccaattgaagggagaagccatgcatggtcaagtggattgttcccccggaatatggcaactcgattgcacgcatctggaaggcaaggtcatcctcgtagcggtacatgttgcttctggatatattgaggccgaggttataccggcagaaacgggccaagaaacagcgtactttctcctgaagcttgcgggacgctggcctgtgaaaacgattcataccgacaacggttctaactttaccggagcaacagtacgggccgcatgctggtgggccggtataaagcaggaatttgggattccatacaatccgcaaagtcaaggtgtcgtcgagtctatgaataaggaactcaaaaagataattggtcaggttagagatcaagccgaacatctcaagacggcggtccaaatggcagtttttattcacaactttaagaggaaaggtgggattggtggctattcagcaggggagcgaatagtggacataatagcaaccgacatacagactaaggagttgcaaaagcagatcacaaagattcaaaattttcgggtttattaccgcgatagccggaatccgctttggaaaggtcctgcgaaacttttgtggaagggcgagggagctgtcgtcattcaggataacagcgacatcaaggtcgttccgcggcgcaaggcgaaaatcatacgggactatggtaaacaaatggccggggatgacagcgttgcgtcccggcaagacgaggat

SEQ ID NO: 110 - DNA, 864 bp, Artificial Sequence
  chemically synthesized
tttttggacggtattgacaaagctcaggacgaacatgaaaagtaccactctaactggagagctatggcctccgattttaatcttccgccggtggtagcgaaagaaatcgttgccagttgcgacaaatgccaattgaagggagaagccatgcatggtcaagtggattgttcccccggaatatggcaactcgattgcacgcatctggaaggcaaggtcatcctcgtagcggtacatgttgcttctggatatattgaggccgaggttataccggcagaaacgggccaagaaacagcgtactttctcctgaagcttgcgggacgctggcctgtgaaaacgattcataccgacaacggttctaactttaccggagcaacagtacgggccgcatgctggtgggccggtataaagcaggaatttgggattccatacaatccgcaaagtcaaggtgtcgtcgagtctatgaataaggaactcaaaaagataattggtcaggttagagatcaagccgaacatctcaagacggcggtccaaatggcagtttttattcacaacaagaagaggaaaggtgggattggtggctattcagcaggggagcgaatagtggacataatagcaaccgacatacagactaaggagttgcaaaagcagatcacaaagattcaaaattttcgggtttattaccgcgatagccggaatccgctttggaaaggtcctgcgaaacttttgtggaagggcgagggagctgtcgtcattcaggataacagcgacatcaaggtcgttccgcggcgcaaggcgaaaatcatacgggactatggtaaacaaatggccggggatgactgcgttgcgtcccggcaagacgaggat

SEQ ID NO: 111 - DNA, 666 bp, Artificial Sequence
  chemically synthesized
tttttggacggtattgacaaagctcaggacgaacatgaaaagtaccactctaactggagagctatggcctccgattttaatcttccgccggtggtagcgaaagaaatcgttgccagttgcgacaaatgccaattgaagggagaagccatgcatggtcaagtggattgttcccccggaatatggcaactcgattgcacgcatctggaaggcaaggtcatcctcgtagcggtacatgttgcttctggatatattgaggccgaggttataccggcagaaacgggccaagaaacagcgtactttctcctgaagcttgcgggacgctggcctgtgaaaacgattcataccgacaacggttctaactttaccggagcaacagtacgggccgcatgctggtgggccggtataaagcaggaatttgggattccatacaatccgcaaagtcaaggtgtcgtcgagtctatgaataaggaactcaaaaagataattggtcaggttagagatcaagccgaacatctcaagacggcggtccaaatggcagtttttattcacaacaagaagaggaaaggtgggattggtggctattcagcaggggagcgaatagtggacataatagcaaccgacatacagactaaggagttgcaaaagcagatcacaaagattcaaaat

SEQ ID NO: 112 - DNA, 864 bp, Artificial Sequence
  chemically synthesized
tttttggacggtattgacaaagctcaggacgaacatgaaaagtaccactctaactggagagctatggcctccgattttaatcttccgccggtggtagcgaaagaaatcgttgccagttgcgacaaatgccaattgaagggagaagccatgcatggtcaagtggattgttcccccggaatatggcaactcgattgcacgcatctggaaggcaaggtcatcctcgtagcggtacatgttgcttctggatatattgaggccgaggttataccggcagaaacgggccaagaagcggcgtactttctcctgaagcttgcgggacgctggcctgtgaaaacgattcataccgacaacggttctaactttaccggagcaacagtacgggccgcatgctggtgggccggtataaagcaggaatttgggattccacggaatccgcaaagtcaaggtgtcgtcgagtctatgaataaggaactcaaaaagataattggtcaggttagagatcaagccgaacatctcaagacggcggtccaaatggcagtttttattcacaactttaagaggaaaggtgggattggtggctattcagcaggggagcgaatagtggacataatagcaaccgacatacagactaaggagttgcaaaagcagatcacaaagattcaaaattttcgggtttattaccgcgatagccggaatccgctttggaaaggtcctgcgaaacttttgtggaagggcgagggagctgtcgtcattcaggataacagcgacatcaaggtcgttccgcggcgcaaggcgaaaatcatacgggactatggtaaacaaatggccggggatgactgcgttgcgtcccggcaagacgaggat

SEQ ID NO: 113 - DNA, 666 bp, Artificial Sequence
  chemically synthesized
tttttggacggtattgacaaagctcaggacgaacatgaaaagtaccactctaactggagagctatggcctccgattttaatcttccgccggtggtagcgaaagaaatcgttgccagttgcgacaaatgccaattgaagggagaagccatgcatggtcaagtggattgttcccccggaatatggcaactcgattgcacgcatctggaaggcaaggtcatcctcgtagcggtacatgttgcttctggatatattgaggccgaggttataccggcagaaacgggccaagaagcggcgtactttctcctgaagcttgcgggacgctggcctgtgaaaacgattcataccgacaacggttctaactttaccggagcaacagtacgggccgcatgctggtgggccggtataaagcaggaatttgggattccacggaatccgcaaagtcaaggtgtcgtcgagtctatgaataaggaactcaaaaagataattggtcaggttagagatcaagccgaacatctcaagacggcggtccaaatggcagtttttattcacaactttaagaggaaaggtgggattggtggctattcagcaggggagcgaatagtggacataatagcaaccgacatacagactaaggagttgcaaaagcagatcacaaagattcaaaat

SEQ ID NO: 114 - DNA, 864 bp, Artificial Sequence
  chemically synthesized
tttttggacggtattgacaaagctcaggacgaacatgaaaagtaccactctaactggagagctatggcctccgattttaatcttccgccggtggtagcgaaagaaatcgttgccagttgcgacaaatgccaattgaagggagaagccatgcatggtcaagtggattgttcccccggaatatggcaactcgattgcacgcatctggaaggcaaggtcatcctcgtagcggtacatgttgcttctggatatattgaggccgaggttataccggcagaaacgggccaagaaacagcgtactttctcctgaagcttgcgggacgctggcctgtgaaaacgattcataccgacaacggttctaactttaccggagcaacagtacgggccgcatgctggtgggccggtataaagcaggaatttagcattccatacaatccgcaaagtcacggtgtcgtcgagtctatgaataaggaactcaaaaagataattggtcaggttagagatcaagccgaacatctcaagacggcggtccaaatggcagtttttattcacaactttaagaggaaaggtgggattggtggctattcagcaggggagcgaatagtggacataatagcaaccgacatacagactaaggagttgcaaaagcagatcacaaagattcaaaattttcgggtttattaccgcgatagccggaatccgctttggaaaggtcctgcgaaacttttgtggaagggcgagggagctgtcgtcattcaggataacagcgacatcaaggtcgttccgcggcgcaaggcgaaaatcatacgggactatggtaaacaaatggccggggatgactgcgttgcgtcccggcaagacgaggat

SEQ ID NO: 115 - DNA, 666 bp, Artificial Sequence
  chemically synthesized
tttttggacggtattgacaaagctcaggacgaacatgaaaagtaccactctaactggagagctatggcctccgattttaatcttccgccggtggtagcgaaagaaatcgttgccagttgcgacaaatgccaattgaagggagaagccatgcatggtcaagtggattgttcccccggaatatggcaactcgattgcacgcatctggaaggcaaggtcatcctcgtagcggtacatgttgcttctggatatattgaggccgaggttataccggcagaaacgggccaagaaacagcgtactttctcctgaagcttgcgggacgctggcctgtgaaaacgattcataccgacaacggttctaactttaccggagcaacagtacgggccgcatgctggtgggccggtataaagcaggaatttagcattccatacaatccgcaaagtcacggtgtcgtcgagtctatgaataaggaactcaaaaagataattggtcaggttagagatcaagccgaacatctcaagacggcggtccaaatggcagtttttattcacaactttaagaggaaaggtgggattggtggctattcagcaggggagcgaatagtggacataatagcaaccgacatacagactaaggagttgcaaaagcagatcacaaagattcaaaat

SEQ ID NO: 116 - DNA, 969 bp, Artificial Sequence
  chemically synthesized
ccacttcgcgaggctaaggatttgcatactgcccttcatataggcccacgagctttgtcaaaagcctgtaatatcagcatgcagcaggcgagggaggtggtacagacctgtcctcactgcaatagtgccccagcccttgaggcaggggtcaatcccagagggcttgggccgcttcagatttggcaaacagatttcactcttgaaccgcgaatggcaccccggagttggcttgctgtaaccgtagatactgcgagtagcgctattgtggtcacacaacacggtagagtcacatccgtcgctgtgcaacatcattgggctaccgcaatagcggtattgggccgacctaaggcgattaagaccgacaacgggtcttgtttcactagcaagtctacacgggagtggctggctagatgggggattgcgcatacgaccgggattccgggcaacagtcagggtcaggccatggtagaaagggccaatcgccttctcaaggataggattcgggtactggccgagggtgatggctttatgaaacgcatcccaacatcaaagcagggggagcttctcgctaaggcgatgtatgcacttaatcattttgagagaggcgagaacactaagacgccaatacagaagcactggagacctacagtccttaccgaaggtccgcccgtcaaaattcggatcgaaacaggtgaatgggagaaaggatggaacgttcttgtttggggtcgaggctatgccgctgtgaagaatcgcgacactgataaggtgatatgggtcccgtcacgcaaagttaagcctgacatcacccaaaaagacgaggtcaccaaaaaggacgaagccagccccttgtttgctggaatttcagattggataccctgggaggatgagcaggaggggctccaaggagagactgcgtctaacaagcaggagagaccaggggaggatactctggcggccaatgaatct

SEQ ID NO: 117 - DNA, 663 bp, Artificial Sequence
  chemically synthesized
ccacttcgcgaggctaaggatttgcatactgcccttcatataggcccacgagctttgtcaaaagcctgtaatatcagcatgcagcaggcgagggaggtggtacagacctgtcctcactgcaatagtgccccagcccttgaggcaggggtcaatcccagagggcttgggccgcttcagatttggcaaacagatttcactcttgaaccgcgaatggcaccccggagttggcttgctgtaaccgtagatactgcgagtagcgctattgtggtcacacaacacggtagagtcacatccgtcgctgtgcaacatcattgggctaccgcaatagcggtattgggccgacctaaggcgattaagaccgacaacgggtcttgtttcactagcaagtctacacgggagtggctggctagatgggggattgcgcatacgaccgggattccgggcaacagtcagggtcaggccatggtagaaagggccaatcgccttctcaaggataggattcgggtactggccgagggtgatggctttatgaaacgcatcccaacatcaaagcagggggagcttctcgctaaggcgatgtatgcacttaatcattttgagagaggcgagaacactaagacgccaatacagaagcactggagacctacagtccttaccgaaggt

SEQ ID NO: 118 - DNA, 1176 bp, Artificial Sequence
  chemically synthesized
tgcaataccaaaaaacccaatctggatgcggagttggaccagttgctgcaaggtcactatatcaaggggtatcccaagcaatatacctattttctcgaagatgggaaggtaaaagtctctcggcccgagggcgtaaagattattccaccccaatcagaccgccaaaagatagttcttcaggcacataaccttgcccatacggggcgcgaggctacgctccttaagatcgcgaatctttattggtggcccaatatgcgaaaagacgtagtcaagcagcttggacgatgtcaacagtgtcttattacgaatgctagtaataaggcatctgggcctattcttagacccgaccggcctcaaaagccgtttgataagttcttcatcgactatattggaccattgccgcccagccagggttatctttatgtgttggtggtggtagacggtatgactggattcacatggctgtatcccacaaaggcgccgagcacgtccgctactgtaaaaagtctgaatgttctcacctccatagccatacctaaggttatccattccgaccaaggcgcggcgttcaccagtagtacctttgcggagtgggcaaaggagcggggtatccatttggagttctctacaccataccacccacagtcaggctcaaaggttgaacgaaagaatagcgatattaagaggctcctcacgaagctgctcgtgggacgaccaacaaaatggtacgatttgcttccggtcgtacagttggcactgaacaatacctacagcccggttctgaaatatacgccgcatcagcttctgttcggaatcgacagtaatacaccttttgccaaccaggacacactggatcttactagagaggaggaactgagtcttctgcaggagattcgcacttcactttaccatccgtctactccccctgcttcatcaagatcatggagtcccgttgtgggccagcttgttcaggaaagagtggcccgcccagccagtcttcggcctagatggcataagcccagcacagtacttaaggtactgaaccctaggacggttgtcatactcgatcacctgggcaataaccggactgtaagcatagataatctcaaaccaacatcccaccaaaatggcacgactaatgataccgcaacaatggatcatctggagaaaaatgag

SEQ ID NO: 119 - DNA, 948 bp, Artificial Sequence
  chemically synthesized
tgcaataccaaaaaacccaatctggatgcggagttggaccagttgctgcaaggtcactatatcaaggggtatcccaagcaatatacctattttctcgaagatgggaaggtaaaagtctctcggcccgagggcgtaaagattattccaccccaatcagaccgccaaaagatagttcttcaggcacataaccttgcccatacggggcgcgaggctacgctccttaagatcgcgaatctttattggtggcccaatatgcgaaaagacgtagtcaagcagcttggacgatgtcaacagtgtcttattacgaatgctagtaataaggcatctgggcctattcttagacccgaccggcctcaaaagccgtttgataagttcttcatcgactatattggaccattgccgcccagccagggttatctttatgtgttggtggtggtagacggtatgactggattcacatggctgtatcccacaaaggcgccgagcacgtccgctactgtaaaaagtctgaatgttctcacctccatagccatacctaaggttatccattccgaccaaggcgcggcgttcaccagtagtacctttgcggagtgggcaaaggagcggggtatccatttggagttctctacaccataccacccacagtcaggctcaaaggttgaacgaaagaatagcgatattaagaggctcctcacgaagctgctcgtgggacgaccaacaaaatggtacgatttgcttccggtcgtacagttggcactgaacaatacctacagcccggttctgaaatatacgccgcatcagcttctgttcggaatcgacagtaatacaccttttgccaaccaggacacactggatcttactagagaggaggaactgagtcttctgcaggagattcgcacttcactttaccatccgtctactccccctgcttcatcaagatcatggagt

SEQ ID NO: 120 - DNA, 831 bp, Artificial Sequence
  chemically synthesized
gggtctaccggagtgttctgggtagaaaacatccaggaagctcaagatgagcacgagaactggcacacctcccctaagatacttgccaggaactacaagatacctctcacggtggcgaaacagatcacccaggagtgcccacactgcaccaagcaaggttccggacctgctggttgtgtaatgaggtcaccaaaccattggcaggccgattgtacgcacctggataataagatcatcctgactttcgttgagagtaattctggatacatacacgcgaccctgctgagcaaggaaaacgccttgtgcacatctctggcaatcttggagtgggctagattgtttagcccaaaatctcttcacacagacaatggcacaaattttgtggccgaaccagttgtgaacttgctgaaattccttaagatcgcgcatacgactggtatcccttatcatcctgaatcacaagggatcgttgagagagctaacagaacactcaaagaaaagattcagagccatcgcgataacacccaaacacttgaagcagcactccagttggcacttataacttgtaacaaggggcgagaatccatgggggggcagactccgtgggaagtatttattaccaaccaggcccaagtaattcatgaaaaacttttgttgcagcaggctcagagttcaaagaaattctgcttttataaaataccgggggagcacgactggaaggggccaacacgggtattgtggaagggcgatggagcggtagtggttaatgatgagggaaaagggatcatcgctgtgccgcttactagaacaaagctccttattaagcctaac

SEQ ID NO: 121 - DNA, 675 bp, Artificial Sequence
  chemically synthesized
gggtctaccggagtgttctgggtagaaaacatccaggaagctcaagatgagcacgagaactggcacacctcccctaagatacttgccaggaactacaagatacctctcacggtggcgaaacagatcacccaggagtgcccacactgcaccaagcaaggttccggacctgctggttgtgtaatgaggtcaccaaaccattggcaggccgattgtacgcacctggataataagatcatcctgactttcgttgagagtaattctggatacatacacgcgaccctgctgagcaaggaaaacgccttgtgcacatctctggcaatcttggagtgggctagattgtttagcccaaaatctcttcacacagacaatggcacaaattttgtggccgaaccagttgtgaacttgctgaaattccttaagatcgcgcatacgactggtatcccttatcatcctgaatcacaagggatcgttgagagagctaacagaacactcaaagaaaagattcagagccatcgcgataacacccaaacacttgaagcagcactccagttggcacttataacttgtaacaaggggcgagaatccatgggggggcagactccgtgggaagtatttattaccaaccaggcccaagtaattcatgaaaaacttttgttgcagcaggctcagagttca

SEQ ID NO: 122 - DNA, 1224 bp, Artificial Sequence
  chemically synthesized
atcgagaatagcagcccttatactagtgaacacttccattatacagtcacggatatcaaagaccttacgaagctgggggctatttatgataagaccaaaaagtattgggtatatcaaggcaagcccgttatgcccgatcagtttacttttgagcttctggatttcctccaccaacttactcatttgagtttctcaaagatgaaagcgctcctcgagagaagccacagcccctactatatgctcaatcgagaccgcacacttaagaacatcacggagacttgcaaggcatgcgctcaagtgaacgcttcaaagagcgcagtaaagcagggtacacgagtaaggggccatcggccaggaacacactgggaaatagatttcactgaaataaaaccgggtctctatgggtataagtatctgcttgtttttatagacacgttttccggatggatcgaggcatttccaacgaaaaaagaaactgccaaggtagtcacaaaaaaactcctggaagagatatttccacggtttggaatgccccaagttcttggcaccgacaatggaccggcgtttgtaagtaaggtgagccaaactgtcgcagacctcttgggaatagattggaagctgcactgtgcataccgcccccaatccagtgggcaagtcgaacgcatgaaccgcacaataaaagaaacgctgacgaaacttactctggcaacagggagccgcgactgggtgctgcttctccccctggcgctttaccgcgcccgcaatacccccggtccccatgggctcactccgtatgagatactctatggggcacccccgccgctcgtgaatttcccggacccggacatgacgcgagtgactaacagcccgtctttgcaggctcaccttcaagccctctatctcgttcagcacgaggtatggaggcctctcgcagccgcgtaccaagagcaattggatcgcccagtagtcccgcacccctatagggttggggacacagtatgggttaggagacatcaaaccaagaacttggaacctaggtggaaggggccctacaccgtcttgcttactacccctacggctctgaaagtagatggcatcgctgcttggatacatgccgcccatgttaaggccgcggatccgggaggaggtccatctagcagactgacttggagagtacaaaggagtcaaaacccgttgaagatcagactgacgagagaggcccca

SEQ ID NO: 123 - DNA, 978 bp, Artificial Sequence
  chemically synthesized
atcgagaatagcagcccttatactagtgaacacttccattatacagtcacggatatcaaagaccttacgaagctgggggctatttatgataagaccaaaaagtattgggtatatcaaggcaagcccgttatgcccgatcagtttacttttgagcttctggatttcctccaccaacttactcatttgagtttctcaaagatgaaagcgctcctcgagagaagccacagcccctactatatgctcaatcgagaccgcacacttaagaacatcacggagacttgcaaggcatgcgctcaagtgaacgcttcaaagagcgcagtaaagcagggtacacgagtaaggggccatcggccaggaacacactgggaaatagatttcactgaaataaaaccgggtctctatgggtataagtatctgcttgtttttatagacacgttttccggatggatcgaggcatttccaacgaaaaaagaaactgccaaggtagtcacaaaaaaactcctggaagagatatttccacggtttggaatgccccaagttcttggcaccgacaatggaccggcgtttgtaagtaaggtgagccaaactgtcgcagacctcttgggaatagattggaagctgcactgtgcataccgcccccaatccagtgggcaagtcgaacgcatgaaccgcacaataaaagaaacgctgacgaaacttactctggcaacagggagccgcgactgggtgctgcttctccccctggcgctttaccgcgcccgcaatacccccggtccccatgggctcactccgtatgagatactctatggggcacccccgccgctcgtgaatttcccggacccggacatgacgcgagtgactaacagcccgtctttgcaggctcaccttcaagccctctatctcgttcagcacgaggtatggaggcctctcgcagccgcgtaccaagagcaattggatcgcccagtagtcccgcacccc

SEQ ID NO: 124 - DNA, 954 bp, Artificial Sequence
  chemically synthesized
ttggagagtgctcaggaatctcacgcacttcaccatcagaatgctgccgcgttgagattccaattccatataactcgcgaacaagcgagagaaatcgtgaagttgtgccctaactgcccggactgggggcacgccccgcagctcggcgtaaaccccagagggcttaaaccaagggttctttggcagatggatgtgacccatgtgtccgagtttgggaagctgaaatatgtccacgttactgtggatacttactcacattttacattcgccactgctcgcacaggagaagctaccaaggatgtgctccaacacctggcacaaagctttgcgtacatgggaataccacagaaaattaaaactgacaacgcacctgcttatgtgagccgatccattcaggagtttttggcacgctggaagatcagtcatgtaacaggcattccgtataatccccagggtcaggcaattgtagaacgcactcaccaaaacatcaaggctcaactgaataagcttcagaaggctgggaaatactacacacctcatcatctcttggcacacgcactgtttgtcttgaaccacgtaaatatggacaatcagggtcacacagccgctgaacgacattgggggccgatctccgctgacccgaaacctatggttatgtggaaagatctgttgacgggaagctggaagggcccagacgttcttattactgcgggtcgcggctacgcttgtgtgttcccgcaagacgcggaaactcccatctgggttccagatcgctttattcgaccgttcactgagaggaaagaggccacacctaccccgggtactgccgagaagacacccccaagagatgagaaagatcaacaggagagcccaaagaatgagtctagcccccaccaaagagaggacggtttggcaacatccgccggagtcgatcttcggtcagggggtggcccg

SEQ ID NO: 125 - DNA, 636 bp, Artificial Sequence
  chemically synthesized
ttggagagtgctcaggaatctcacgcacttcaccatcagaatgctgccgcgttgagattccaattccatataactcgcgaacaagcgagagaaatcgtgaagttgtgccctaactgcccggactgggggcacgccccgcagctcggcgtaaaccccagagggcttaaaccaagggttctttggcagatggatgtgacccatgtgtccgagtttgggaagctgaaatatgtccacgttactgtggatacttactcacattttacattcgccactgctcgcacaggagaagctaccaaggatgtgctccaacacctggcacaaagctttgcgtacatgggaataccacagaaaattaaaactgacaacgcacctgcttatgtgagccgatccattcaggagtttttggcacgctggaagatcagtcatgtaacaggcattccgtataatccccagggtcaggcaattgtagaacgcactcaccaaaacatcaaggctcaactgaataagcttcagaaggctgggaaatactacacacctcatcatctcttggcacacgcactgtttgtcttgaaccacgtaaatatggacaatcagggtcacacagccgctgaacgacattgggggccgatctccgct

SEQ ID NO: 126 - DNA, 1140 bp, Artificial Sequence
  chemically synthesized
gtcttgaaaaagggcgatgcgctggcgagcacggatcttgtaatggaatattctgaaactgacgaaaagtttacagcaggagctgaactgcacgatggagtgtttatgcggggcgatcttattgtccctccactcgaaatgctccacgccatactcttggcaatacacggggtgagtcatacacataagggtgggataatgtcatacttttctaagttttggacccaccctaaagctagtcagacgatcgatctcatcctcggtcactgccaaatctgccttaaacataacccaaagtataagtccaggctccaaggacaccgccctttgcccagtcgacccttcgcacacttgcaaattgattttgtccaaatgtgcgtaaaaaagcctatgtatgcacttgttatcattgatgtatttagtaaatggccagagataattccttgtaataaagaagacgcaaaaactgtatgcgatattctcatgaaggacataatccctagatggggcctgcctgatcaaattgacagcgatcaaggcacgcatttcacagcaaagataagccaagaactgacccactccattggagtggcatggaaactccactgtccaggtcacccccggagttcagggatcgttgagcgcacgaaccgaacattgaaatctaagattatcaaggcccaggagcagcttcaactgagtaaatggactgaggttttgccctacgtgctgctcgaaatgagagcaactcccaagaagcacggacttagccctcatgaaatcgtaatggggcgacccatgaaaacaacctacctttccgatatgtcccctctgtgggccactgacactttggtgacttacatgaacaagttgacacgacaactctctgcctaccaccagcaagttgtagaccagtggccctccactagcttgccgcccggacctgaacccggatcttggtgtatgctcagaaatccgaaaaagtccagcaactgggaaggtccctttctcatcctcttgtctacgcctacagcagttaaggttgagggaaggccaacgtggattcatctcgatcattgtaaattgctgcgcagttcactgtccagctctttgggtggcccggtaaatcaactgttgagc

SEQ ID NO: 127 - DNA, 933 bp, Artificial Sequence
  chemically synthesized
gtcttgaaaaagggcgatgcgctggcgagcacggatcttgtaatggaatattctgaaactgacgaaaagtttacagcaggagctgaactgcacgatggagtgtttatgcggggcgatcttattgtccctccactcgaaatgctccacgccatactcttggcaatacacggggtgagtcatacacataagggtgggataatgtcatacttttctaagttttggacccaccctaaagctagtcagacgatcgatctcatcctcggtcactgccaaatctgccttaaacataacccaaagtataagtccaggctccaaggacaccgccctttgcccagtcgacccttcgcacacttgcaaattgattttgtccaaatgtgcgtaaaaaagcctatgtatgcacttgttatcattgatgtatttagtaaatggccagagataattccttgtaataaagaagacgcaaaaactgtatgcgatattctcatgaaggacataatccctagatggggcctgcctgatcaaattgacagcgatcaaggcacgcatttcacagcaaagataagccaagaactgacccactccattggagtggcatggaaactccactgtccaggtcacccccggagttcagggatcgttgagcgcacgaaccgaacattgaaatctaagattatcaaggcccaggagcagcttcaactgagtaaatggactgaggttttgccctacgtgctgctcgaaatgagagcaactcccaagaagcacggacttagccctcatgaaatcgtaatggggcgacccatgaaaacaacctacctttccgatatgtcccctctgtgggccactgacactttggtgacttacatgaacaagttgacacgacaactctctgcctaccaccagcaagttgtagaccagtggccctccactagcttg

SEQ ID NO: 128 - DNA, 888 bp, Artificial Sequence
  chemically synthesized
ttgccactggaaacacctgagcaatggcacaagctgacccattgtaacagccgagcacttagtcgatggccgaatccgaggatttccgcttgggacccacgatctccggccaccctgtgcgaaacgtgtcagaaactcaatccaacagggggcgggaaaatgagaacgatccagcgagggtgggctcctaaccacatctggcaggctgacatcacgcattacaagtataaacagtttacatacgcactgcatgtgttcgtcgatacgtattcaggtgctacacacgcttctgctaagcgcggtctcacaacacagatgacgattgaaggccttcttgaggctattgtccacttgggaaggccgaaaaagttgaacaccgatcaaggtgcaaactatacgagcaagactttcgttcggttttgccaacagtttggggtatctcttagtcatcacgtaccctataatcccaccagttccggcttggtggaacgaacgaacggtctgctgaaactgttgctgtccaaatatcacttggatgagccacatttgccgatgactcaggccctctcccgcgctctctggacacacaaccagataaaccttctcccgatacttaagactcgctgggaacttcaccattcacctccattggcagttattagtgaaggtggtgagactcctaaaggtagtgacaaacttttcttgtacaagttgcccggccaaaataaccggaggtggctcgggccgttgccagcgcttgtcgaagcgtctggcggggccctgcttgcgaccgacccccctgtctgggtgccatggcggctcttgaaggcgttcaagtgcctgaaaaatgacggaccagaagacgcgcataatagaagctcagatggt

SEQ ID NO: 129 - DNA, 681 bp, Artificial Sequence
  chemically synthesized
ttgccactggaaacacctgagcaatggcacaagctgacccattgtaacagccgagcacttagtcgatggccgaatccgaggatttccgcttgggacccacgatctccggccaccctgtgcgaaacgtgtcagaaactcaatccaacagggggcgggaaaatgagaacgatccagcgagggtgggctcctaaccacatctggcaggctgacatcacgcattacaagtataaacagtttacatacgcactgcatgtgttcgtcgatacgtattcaggtgctacacacgcttctgctaagcgcggtctcacaacacagatgacgattgaaggccttcttgaggctattgtccacttgggaaggccgaaaaagttgaacaccgatcaaggtgcaaactatacgagcaagactttcgttcggttttgccaacagtttggggtatctcttagtcatcacgtaccctataatcccaccagttccggcttggtggaacgaacgaacggtctgctgaaactgttgctgtccaaatatcacttggatgagccacatttgccgatgactcaggccctctcccgcgctctctggacacacaaccagataaaccttctcccgatacttaagactcgctgggaacttcaccattcacctccattggcagttattagtgaaggtggtgagactcct

SEQ ID NO: 130 - DNA, 879 bp, Artificial Sequence
  chemically synthesized
ttcctggagaaaattgagcctgcgcaagaagagcacgacaaatatcacagtaatgtaaaggagttggttttcaaatttggacttccacggattgtagctcgccagatagttgatacctgtgataaatgtcaccaaaagggtgaagctattcacggtcaggcgaactctgacttgggcacgtggcagatggactgcactcacttggaaggtaaaatcattatcgttgcggttcatgtagccagtggattcatcgaagcagaagtcattcctcaggaaacaggaagacagacagcactgttcctcctcaagctcgcaggtaggtggcccatcacgcatcttcataccgataatggcgcaaactttgcaagccaggaggtgaaaatggtagcttggtgggctggtatagaacacacgtttggtgtcccgtacaaccctcaaagtcaaggcgttgtggaggccatgaaccatcacttgaagaaccaaatcgaccgcataagagagcaggccaactccgtagaaacgatcgtactcatggcggtacactgcatgaacttcaagcgacgaggaggcatcggggatatgacgcccgcggagcggctcatcaatatgataacaaccgaacaggagattcagttccaacagtccaaaaactcaaaatttaagaattttagagtgtattaccgggaaggtagagaccagttgtggaagggtcctggtgaattgttgtggaagggtgaaggtgcggtaatcctgaaggtaggtaccgacatcaaggtcgttcccagaaggaaggctaagatcatcaaggattatgggggtgggaaagaagtggattcctctagtcacatggaagataccggcgaggctagggaggttgcg

SEQ ID NO: 131 - DNA, 666 bp, Artificial Sequence
  chemically synthesized
ttcctggagaaaattgagcctgcgcaagaagagcacgacaaatatcacagtaatgtaaaggagttggttttcaaatttggacttccacggattgtagctcgccagatagttgatacctgtgataaatgtcaccaaaagggtgaagctattcacggtcaggcgaactctgacttgggcacgtggcagatggactgcactcacttggaaggtaaaatcattatcgttgcggttcatgtagccagtggattcatcgaagcagaagtcattcctcaggaaacaggaagacagacagcactgttcctcctcaagctcgcaggtaggtggcccatcacgcatcttcataccgataatggcgcaaactttgcaagccaggaggtgaaaatggtagcttggtgggctggtatagaacacacgtttggtgtcccgtacaaccctcaaagtcaaggcgttgtggaggccatgaaccatcacttgaagaaccaaatcgaccgcataagagagcaggccaactccgtagaaacgatcgtactcatggcggtacactgcatgaacttcaagcgacgaggaggcatcggggatatgacgcccgcggagcggctcatcaatatgataacaaccgaacaggagattcagttccaacagtccaaaaactcaaaatttaagaat

SEQ ID NO: 132 - DNA, 843 bp, Artificial Sequence
  chemically synthesized
agttcttgggtagaccgaatagaggaggctgagattaaccacgaaaaattccacagcgaccctcagtatcttcgaaccgaatttaatttgcccaagatggtcgctgaagaaatccgacgaaagtgccctgtatgccgcatccggggcgaacaggtgggcggccagttgaagataggtcctggtatctggcagatggactgcacgcacttcgatggcaagatcatcctggtagggatacacgtagagtcaggttatatctgggcgcagattattagtcaggaaacggctgactgcactgtaaaggctgtccttcaacttttgagcgcccacaatgtcaccgaactccaaacagacaatggacctaattttaagaatcagaaaatggagggggtattgaactatatgggggtaaaacataaattcggtattccagggaacccgcaatctcaggcgctggtggagaacgttaatcatacccttaaggtgtggattcggaagttcctgccagaaactactagcctggataacgccctgtcattggctgttcactcacttaattttaaacggaggggcagaataggcggaatggccccctacgaattgttggctcaacaagagagtcttaggatacaagattacttctcagcaataccccaaaaattgcaagcacagtggatttattacaaagatcagaaagataagaaatggaagggaccgatgcgagttgagtattgggggcaagggtctgttctccttaaggatgaagagaagggttacttcttgataccccggcggcatatacgacgggtgcccgaaccttgcgcactgcccgagggtgatgaa

SEQ ID NO: 133 - DNA, 669 bp, Artificial Sequence
  chemically synthesized
agttcttgggtagaccgaatagaggaggctgagattaaccacgaaaaattccacagcgaccctcagtatcttcgaaccgaatttaatttgcccaagatggtcgctgaagaaatccgacgaaagtgccctgtatgccgcatccggggcgaacaggtgggcggccagttgaagataggtcctggtatctggcagatggactgcacgcacttcgatggcaagatcatcctggtagggatacacgtagagtcaggttatatctgggcgcagattattagtcaggaaacggctgactgcactgtaaaggctgtccttcaacttttgagcgcccacaatgtcaccgaactccaaacagacaatggacctaattttaagaatcagaaaatggagggggtattgaactatatgggggtaaaacataaattcggtattccagggaacccgcaatctcaggcgctggtggagaacgttaatcatacccttaaggtgtggattcggaagttcctgccagaaactactagcctggataacgccctgtcattggctgttcactcacttaattttaaacggaggggcagaataggcggaatggccccctacgaattgttggctcaacaagagagtcttaggatacaagattacttctcagcaataccccaaaaattgcaagca

SEQ ID NO: 134 - DNA, 843 bp, Artificial Sequence
  chemically synthesized
acctgctttctcgaaaacattccatctgccactgaggatcacgaaaggtggcatacttcccccgacatcttggtccgacaatttcacctccctaaaagaatagcaaaagagatcgtagcacggtgccaggaatgtaaacgcaccacaacttctccggtccggggtacgaaccccagagggcgcttcttgtggcaaatggataatactcactggaataagacgataatatgggttgcagtcgagacaaattccggtctcgtggaagcgcaagttatcccggaggagaccgcactgcaagtagccttgtgtatccttcaacttattcaacgatacacggtcttgcatctccattctgacaatgggccctgttttactgcacatagaatagaaaacttgtgtaaatacctcggtattactaagactacgggtatcccatataatcctcagtcacagggcgtagtggagcgagcgcatcgggaccttaaagacagattggcagcctatcagggagactgcgaaacagtagaagccgcgctgagtcttgcattggtgtccctgaataaaaagcgggggggcataggaggccatacaccgtatgagatttacctggagtccgagcacacaaagtaccaagatcagttggagcagcagttctcaaagcaaaagatcgaaaaatggtgctacgtgaggaacaggaggaaggagtggaagggaccgtacaaggtcttgtgggatggggatggagccgcggtcatcgaggaggagggaaaaacagcactttatccacaccgacacatgcggttcatcccaccgcccgactccgacattcaagacgggagttca

SEQ ID NO: 135 - DNA, 672 bp, Artificial Sequence
  chemically synthesized
acctgctttctcgaaaacattccatctgccactgaggatcacgaaaggtggcatacttcccccgacatcttggtccgacaatttcacctccctaaaagaatagcaaaagagatcgtagcacggtgccaggaatgtaaacgcaccacaacttctccggtccggggtacgaaccccagagggcgcttcttgtggcaaatggataatactcactggaataagacgataatatgggttgcagtcgagacaaattccggtctcgtggaagcgcaagttatcccggaggagaccgcactgcaagtagccttgtgtatccttcaacttattcaacgatacacggtcttgcatctccattctgacaatgggccctgttttactgcacatagaatagaaaacttgtgtaaatacctcggtattactaagactacgggtatcccatataatcctcagtcacagggcgtagtggagcgagcgcatcgggaccttaaagacagattggcagcctatcagggagactgcgaaacagtagaagccgcgctgagtcttgcattggtgtccctgaataaaaagcgggggggcataggaggccatacaccgtatgagatttacctggagtccgagcacacaaagtaccaagatcagttggagcagcagttctcaaagcaaaagatcgaa

SEQ ID NO: 136 - DNA, 801 bp, Artificial Sequence
  chemically synthesized
aatgtgcatacgtcagagtcaaccagaaagtacccctacccgttcattcataggatgttggcccatgcaaacgcgcagactatcaggtattctctcaagaataatacgatcacgtatttcaatgagagtgatgtggactggtcctccgcgattgactatcaatgcccggactgcctgattgggaagagtaccaaacatcgccatatcaagggaagtaggctcaaatatcagaacagctatgaaccttttcagtatctgcatacagacatattcgggccagtgcacaacctgccaaaaagcgctcctagctatttcattagtttcaccgacgaaacaacaaagtttaggtgggtttatccactgcacgacaggagggaagacagcatactcgatgtcttcacgacaattctggcgtttatcaagaatcagttccaagcgagcgtgttggtgatacagatggatagaggcagcgaatatactaaccgaactcttcacaaattcttggagaagaacgggataactccttgttacacaacaacagcagattcacgcgcacacggcgtcgcggagcggctcaacaggactctcctggacgattgccgcactcaactccagtgttcagggctcccaaaccatctctggttttctgccatagagttttctactatagtgcgcaattccctcgcgagcccaaaatctaagaaaagcgcgaggcaacatgcaggactggctggccttgacatctccacactgctgccttttggtcagccggtaattgtcaatgaccataaccccaacagc

SEQ ID NO: 137 - DNA, 861 bp, Artificial Sequence
  chemically synthesized
aaatacgtctttattgaaaagcaccaggccgaattttccatcaaagctatgtgtagagtcttgagagttgcaagaagcggctggtacacctggtgtcagaggagaactcgcatatccacgcggcagcagtttcgacaacactgcgattccgtggtgttggccgcatttacgcgatcaaaacaaagatacggcgcacctcgccttaccgacgaactcagggcccaaggatacccatttaatgtgaaaacagttgcggccagtctgcgcaggcaagggctgcgcgctaaggcgagtagaaaatttagccccgtctcttatcgcgcacacggccttcccgtcagcgagaatcttcttgagcaagatttttacgcgtcaggccctaatcaaaagtgggccggggacataacgtatcttagaacagacgagggttggctctatctcgccgtcgtcattgacttgtggagtagggcggtcatagggtggagcatgtcaccacgcatgacagcccaactcgcgtgtgatgccctccaaatggctctgtggaggaggaagcgcccacgcaatgtgattgtgcacaccgatagaggcgggcagtattgtagcgccgattatcaggcgcagttgaagcgccataaccttcgaggtagcatgtccgcgaagggttgttgctatgacaatgcgtgcgtagaatcattctttcatagtttgaaggttgagtgcatccacggggagcattttatctcccgcgaaattatgagggcgacggtctttaactacatcgaatgcgattataatcggtggaggcgacactcttggtgtggtggtcttagcccggagcaatttgaaaacaaaaacctcgcc

SEQ ID NO: 138 - DNA, 525 bp, Artificial Sequence
  chemically synthesized
gtcagcgagaatcttcttgagcaagatttttacgcgtcaggccctaatcaaaagtgggccggggacataacgtatcttagaacagacgagggttggctctatctcgccgtcgtcattgacttgtggagtagggcggtcatagggtggagcatgtcaccacgcatgacagcccaactcgcgtgtgatgccctccaaatggctctgtggaggaggaagcgcccacgcaatgtgattgtgcacaccgatagaggcgggcagtattgtagcgccgattatcaggcgcagttgaagcgccataaccttcgaggtagcatgtccgcgaagggttgttgctatgacaatgcgtgcgtagaatcattctttcatagtttgaaggttgagtgcatccacggggagcattttatctcccgcgaaattatgagggcgacggtctttaactacatcgaatgcgattataatcggtggaggcgacactcttggtgtggtggtcttagcccggagcaatttgaaaacaaaaacctcgcc

SEQ ID NO: 139 - DNA, 4101 bp, Artificial Sequence
  chemically synthesized
gacaagaagtacagcatcggcctggacatcggcaccaactctgtgggctgggccgtgatcaccgacgagtacaaggtgcccagcaagaaattcaaggtgctgggcaacaccgaccggcacagcatcaagaagaacctgatcggagccctgctgttcgacagcggcgaaacagccgaggccacccggctgaagagaaccgccagaagaagatacaccagacggaagaaccggatctgctatctgcaagagatcttcagcaacgagatggccaaggtggacgacagcttcttccacagactggaagagtccttcctggtggaagaggataagaagcacgagcggcaccccatcttcggcaacatcgtggacgaggtggcctaccacgagaagtaccccaccatctaccacctgagaaagaaactggtggacagcaccgacaaggccgacctgcggctgatctatctggccctggcccacatgatcaagttccggggccacttcctgatcgagggcgacctgaaccccgacaacagcgacgtggacaagctgttcatccagctggtgcagacctacaaccagctgttcgaggaaaaccccatcaacgccagcggcgtggacgccaaggccatcctgtctgccagactgagcaagagcagacggctggaaaatctgatcgcccagctgcccggcgagaagaagaatggcctgttcggaaacctgattgccctgagcctgggcctgacccccaacttcaagagcaacttcgacctggccgaggatgccaaactgcagctgagcaaggacacctacgacgacgacctggacaacctgctggcccagatcggcgaccagtacgccgacctgtttctggccgccaagaacctgtccgacgccatcctgctgagcgacatcctgagagtgaacaccgagatcaccaaggcccccctgagcgcctctatgatcaagagatacgacgagcaccaccaggacctgaccctgctgaaagctctcgtgcggcagcagctgcctgagaagtacaaagagattttcttcgaccagagcaagaacggctacgccggctacattgacggcggagccagccaggaagagttctacaagttcatcaagcccatcctggaaaagatggacggcaccgaggaactgctcgtgaagctgaacagagaggacctgctgcggaagcagcggaccttcgacaacggcagcatcccccaccagatccacctgggagagctgcacgccattctgcggcggcaggaagatttttacccattcctgaaggacaaccgggaaaagatcgagaagatcctgaccttccgcatcccctactacgtgggccctctggccaggggaaacagcagattcgcctggatgaccagaaagagcgaggaaaccatcaccccctggaacttcgaggaagtggtggacaagggcgcttccgcccagagcttcatcgagcggatgaccaacttcgataagaacctgcccaacgagaaggtgctgcccaagcacagcctgctgtacgagtacttcaccgtgtataacgagctgaccaaagtgaaatacgtgaccgagggaatgagaaagcccgccttcctgagcggcgagcagaaaaaggccatcgtggacctgctgttcaagaccaaccggaaagtgaccgtgaagcagctgaaagaggactacttcaagaaaatcgagtgcttcgactccgtggaaatctccggcgtggaagatcggttcaacgcctccctgggcacataccacgatctgctgaaaattatcaaggacaaggacttcctggacaatgaggaaaacgaggacattctggaagatatcgtgctgaccctgacactgtttgaggacagagagatgatcgaggaacggctgaaaacctatgcccacctgttcgacgacaaagtgatgaagcagctgaagcggcggagatacaccggctggggcaggctgagccggaagctgatcaacggcatccgggacaagcagtccggcaagacaatcctggatttcctgaagtccgacggcttcgccaacagaaacttcatgcagctgatccacgacgacagcctgacctttaaagaggacatccagaaagcccaggtgtccggccagggcgatagcctgcacgagcacattgccaatctggccggcagccccgccattaagaagggcatcctgcagacagtgaaggtggtggacgagctcgtgaaagtgatgggccggcacaagcccgagaacatcgtgatcgaaatggccagagagaaccagaccacccagaagggacagaagaacagccgcgagagaatgaagcggatcgaagagggcatcaaagagctgggcagccagatcctgaaagaacaccccgtggaaaacacccagctgcagaacgagaagctgtacctgtactacctgcagaatgggcgggatatgtacgtggaccaggaactggacatcaaccggctgtccgactacgatgtggaccatatcgtgcctcagagctttctgaaggacgactccatcgacaacaaggtgctgaccagaagcgacaagaaccggggcaagagcgacaacgtgccctccgaagaggtcgtgaagaagatgaagaactactggcggcagctgctgaacgccaagctgattacccagagaaagttcgacaatctgaccaaggccgagagaggcggcctgagcgaactggataaggccggcttcatcaagagacagctggtggaaacccggcagatcacaaagcacgtggcacagatcctggactcccggatgaacactaagtacgacgagaatgacaagctgatccgggaagtgaaagtgatcaccctgaagtccaagctggtgtccgatttccggaaggatttccagttttacaaagtgcgcgagatcaacaactaccaccacgcccacgacgcctacctgaacgccgtcgtgggaaccgccctgatcaaaaagtaccctaagctggaaagcgagttcgtgtacggcgactacaaggtgtacgacgtgcggaagatgatcgccaagagcgagcaggaaatcggcaaggctaccgccaagtacttcttctacagcaacatcatgaactttttcaagaccgagattaccctggccaacggcgagatccggaagcggcctctgatcgagacaaacggcgaaaccggggagatcgtgtgggataagggccgggattttgccaccgtgcggaaagtgctgagcatgccccaagtgaatatcgtgaaaaagaccgaggtgcagacaggcggcttcagcaaagagtctatcctgcccaagaggaacagcgataagctgatcgccagaaagaaggactgggaccctaagaagtacggcggcttcgacagccccaccgtggcctattctgtgctggtggtggccaaagtggaaaagggcaagtccaagaaactgaagagtgtgaaagagctgctggggatcaccatcatggaaagaagcagcttcgagaagaatcccatcgactttctggaagccaagggctacaaagaagtgaaaaaggacctgatcatcaagctgcctaagtactccctgttcgagctggaaaacggccggaagagaatgctggcctctgccggcgaactgcagaagggaaacgaactggccctgccctccaaatatgtgaacttcctgtacctggccagccactatgagaagctgaagggctcccccgaggataatgagcagaaacagctgtttgtggaacagcacaagcactacctggacgagatcatcgagcagatcagcgagttctccaagagagtgatcctggccgacgctaatctggacaaagtgctgtccgcctacaacaagcaccgggataagcccatcagagagcaggccgagaatatcatccacctgtttaccctgaccaatctgggagcccctgccgccttcaagtactttgacaccaccatcgaccggaagaggtacaccagcaccaaagaggtgctggacgccaccctgatccaccagagcatcaccggcctgtacgagacacggatcgacctgtctcagctgggaggcgac

SEQ ID NO: 140 - DNA, 4101 bp, Artificial Sequence
  chemically synthesized
gataaaaagtattctattggtttagccatcggcactaattccgttggatgggctgtcataaccgatgaatacaaagtaccttcaaagaaatttaaggtgttggggaacacagaccgtcattcgattaaaaagaatcttatcggtgccctcctattcgatagtggcgaaacggcagaggcgactcgcctgaaacgaaccgctcggagaaggtatacacgtcgcaagaaccgaatatgttacttacaagaaatttttagcaatgagatggccaaagttgacgattctttctttcaccgtttggaagagtccttccttgtcgaagaggacaagaaacatgaacggcaccccatctttggaaacatagtagatgaggtggcatatcatgaaaagtacccaacgatttatcacctcagaaaaaagctagttgactcaactgataaagcggacctgaggttaatctacttggctcttgcccatatgataaagttccgtgggcactttctcattgagggtgatctaaatccggacaactcggatgtcgacaaactgttcatccagttagtacaaacctataatcagttgtttgaagagaaccctataaatgcaagtggcgtggatgcgaaggctattcttagcgcccgcctctctaaatcccgacggctagaaaacctgatcgcacaattacccggagagaagaaaaatgggttgttcggtaaccttatagcgctctcactaggcctgacaccaaattttaagtcgaacttcgacttagctgaagatgccaaattgcagcttagtaaggacacgtacgatgacgatctcgacaatctactggcacaaattggagatcagtatgcggacttatttttggctgccaaaaaccttagcgatgcaatcctcctatctgacatactgagagttaatactgagattaccaaggcgccgttatccgcttcaatgatcaaaaggtacgatgaacatcaccaagacttgacacttctcaaggccctagtccgtcagcaactgcctgagaaatataaggaaatattctttgatcagtcgaaaaacgggtacgcaggttatattgacggcggagcgagtcaagaggaattctacaagtttatcaaacccatattagagaagatggatgggacggaagagttgcttgtaaaactcaatcgcgaagatctactgcgaaagcagcggactttcgacaacggtagcattccacatcaaatccacttaggcgaattgcatgctatacttagaaggcaggaggatttttatccgttcctcaaagacaatcgtgaaaagattgagaaaatcctaacctttcgcataccttactatgtgggacccctggcccgagggaactctcggttcgcatggatgacaagaaagtccgaagaaacgattactccatggaattttgaggaagttgtcgataaaggtgcgtcagctcaatcgttcatcgagaggatgaccaactttgacaagaatttaccgaacgaaaaagtattgcctaagcacagtttactttacgagtatttcacagtgtacaatgaactcacgaaagttaagtatgtcactgagggcatgcgtaaacccgcctttctaagcggagaacagaagaaagcaatagtagatctgttattcaagaccaaccgcaaagtgacagttaagcaattgaaagaggactactttaagaaaattgaatgcttcgattctgtcgagatctccggggtagaagatcgatttaatgcgtcacttggtacgtatcatgacctcctaaagataattaaagataaggacttcctggataacgaagagaatgaagatatcttagaagatatagtgttgactcttaccctctttgaagatcgggaaatgattgaggaaagactaaaaacatacgctcacctgttcgacgataaggttatgaaacagttaaagaggcgtcgctatacgggctggggacgattgtcgcggaaacttatcaacgggataagagacaagcaaagtggtaaaactattctcgattttctaaagagcgacggcttcgccaataggaactttatgcagctgatccatgatgactctttaaccttcaaagaggatatacaaaaggcacaggtttccggacaaggggactcattgcacgaacatattgcgaatcttgctggttcgccagccatcaaaaagggcatactccagacagtcaaagtagtggatgagctagttaaggtcatgggacgtcacaaaccggaaaacattgtaatcgagatggcacgcgaaaatcaaacgactcagaaggggcaaaaaaacagtcgagagcggatgaagagaatagaagagggtattaaagaactgggcagccagatcttaaaggagcatcctgtggaaaatacccaattgcagaacgagaaactttacctctattacctacaaaatggaagggacatgtatgttgatcaggaactggacataaaccgtttatctgattacgacgtcgatgccattgtaccccaatcctttttgaaggacgattcaatcgacaataaagtgcttacacgctcggataagaaccgagggaaaagtgacaatgttccaagcgaggaagtcgtaaagaaaatgaagaactattggcggcagctcctaaatgcgaaactgataacgcaaagaaagttcgataacttaactaaagctgagaggggtggcttgtctgaacttgacaaggccggatttattaaacgtcagctcgtggaaacccgccaaatcacaaagcatgttgcacagatactagattcccgaatgaatacgaaatacgacgagaacgataagctgattcgggaagtcaaagtaatcactttaaagtcaaaattggtgtcggacttcagaaaggattttcaattctataaagttagggagataaataactaccaccatgcgcacgacgcttatcttaatgccgtcgtagggaccgcactcattaagaaatacccgaagctagaaagtgagtttgtgtatggtgattacaaagtttatgacgtccgtaagatgatcgcgaaaagcgaacaggagataggcaaggctacagccaaatacttcttttattctaacattatgaatttctttaagacggaaatcactctggcaaacggagagatacgcaaacgacctttaattgaaaccaatggggagacaggtgaaatcgtatgggataagggccgggacttcgcgacggtgagaaaagttttgtccatgccccaagtcaacatagtaaagaaaactgaggtgcagaccggagggttttcaaaggaatcgattcttccaaaaaggaatagtgataagctcatcgctcgtaaaaaggactgggacccgaaaaagtacggtggcttcgatagccctacagttgcctattctgtcctagtagtggcaaaagttgagaagggaaaatccaagaaactgaagtcagtcaaagaattattggggataacgattatggagcgctcgtcttttgaaaagaaccccatcgacttccttgaggcgaaaggttacaaggaagtaaaaaaggatctcataattaaactaccaaagtatagtctgtttgagttagaaaatggccgaaaacggatgttggctagcgccggagagcttcaaaaggggaacgaactcgcactaccgtctaaatacgtgaatttcctgtatttagcgtcccattacgagaagttgaaaggttcacctgaagataacgaacagaagcaactttttgttgagcagcacaaacattatctcgacgaaatcatagagcaaatttcggaattcagtaagagagtcatcctagctgatgccaatctggacaaagtattaagcgcatacaacaagcacagggataaacccatacgtgagcaggcggaaaatattatccatttgtttactcttaccaacctcggcgctccagccgcattcaagtattttgacacaacgatagatcgcaaacgatacacttctaccaaggaggtgctagacgcgacactgattcaccaatccatcacgggattatatgaaactcggatagatttgtcacagcttgggggtgac

SEQ ID NO: 141 - DNA, 3156 bp, Artificial Sequence
  chemically synthesized
aagcggaactacatcctgggcctggacatcggcatcaccagcgtgggctacggcatcatcgactacgagacacgggacgtgatcgatgccggcgtgcggctgttcaaagaggccaacgtggaaaacaacgagggcaggcggagcaagagaggcgccagaaggctgaagcggcggaggcggcatagaatccagagagtgaagaagctgctgttcgactacaacctgctgaccgaccacagcgagctgagcggcatcaacccctacgaggccagagtgaagggcctgagccagaagctgagcgaggaagagttctctgccgccctgctgcacctggccaagagaagaggcgtgcacaacgtgaacgaggtggaagaggacaccggcaacgagctgtccaccaaagagcagatcagccggaacagcaaggccctggaagagaaatacgtggccgaactgcagctggaacggctgaagaaagacggcgaagtgcggggcagcatcaacagattcaagaccagcgactacgtgaaagaagccaaacagctgctgaaggtgcagaaggcctaccaccagctggaccagagcttcatcgacacctacatcgacctgctggaaacccggcggacctactatgagggacctggcgagggcagccccttcggctggaaggacatcaaagaatggtacgagatgctgatgggccactgcacctacttccccgaggaactgcggagcgtgaagtacgcctacaacgccgacctgtacaacgccctgaacgacctgaacaatctcgtgatcaccagggacgagaacgagaagctggaatattacgagaagttccagatcatcgagaacgtgttcaagcagaagaagaagcccaccctgaagcagatcgccaaagaaatcctcgtgaacgaagaggatattaagggctacagagtgaccagcaccggcaagcccgagttcaccaacctgaaggtgtaccacgacatcaaggacattaccgcccggaaagagattattgagaacgccgagctgctggatcagattgccaagatcctgaccatctaccagagcagcgaggacatccaggaagaactgaccaatctgaactccgagctgacccaggaagagatcgagcagatctctaatctgaagggctataccggcacccacaacctgagcctgaaggccatcaacctgatcctggacgagctgtggcacaccaacgacaaccagatcgctatcttcaaccggctgaagctggtgcccaagaaggtggacctgtcccagcagaaagagatccccaccaccctggtggacgacttcatcctgagccccgtcgtgaagagaagcttcatccagagcatcaaagtgatcaacgccatcatcaagaagtacggcctgcccaacgacatcattatcgagctggcccgcgagaagaactccaaggacgcccagaaaatgatcaacgagatgcagaagcggaaccggcagaccaacgagcggatcgaggaaatcatccggaccaccggcaaagagaacgccaagtacctgatcgagaagatcaagctgcacgacatgcaggaaggcaagtgcctgtacagcctggaagccatccctctggaagatctgctgaacaaccccttcaactatgaggtggaccacatcatccccagaagcgtgtccttcgacaacagcttcaacaacaaggtgctcgtgaagcaggaagaaaacagcaagaagggcaaccggaccccattccagtacctgagcagcagcgacagcaagatcagctacgaaaccttcaagaagcacatcctgaatctggccaagggcaagggcagaatcagcaagaccaagaaagagtatctgctggaagaacgggacatcaacaggttctccgtgcagaaagacttcatcaaccggaacctggtggataccagatacgccaccagaggcctgatgaacctgctgcggagctacttcagagtgaacaacctggacgtgaaagtgaagtccatcaatggcggcttcaccagctttctgcggcggaagtggaagtttaagaaagagcggaacaaggggtacaagcaccacgccgaggacgccctgatcattgccaacgccgatttcatcttcaaagagtggaagaaactggacaaggccaaaaaagtgatggaaaaccagatgttcgaggaaaagcaggccgagagcatgcccgagatcgaaaccgagcaggagtacaaagagatcttcatcaccccccaccagatcaagcacattaaggacttcaaggactacaagtacagccaccgggtggacaagaagcctaatagagagctgattaacgacaccctgtactccacccggaaggacgacaagggcaacaccctgatcgtgaacaatctgaacggcctgtacgacaaggacaatgacaagctgaaaaagctgatcaacaagagccccgaaaagctgctgatgtaccaccacgacccccagacctaccagaaactgaagctgattatggaacagtacggcgacgagaagaatcccctgtacaagtactacgaggaaaccgggaactacctgaccaagtactccaaaaaggacaacggccccgtgatcaagaagattaagtattacggcaacaaactgaacgcccatctggacatcaccgacgactaccccaacagcagaaacaaggtcgtgaagctgtccctgaagccctacagattcgacgtgtacctggacaatggcgtgtacaagttcgtgaccgtgaagaatctggatgtgatcaaaaaagaaaactactacgaagtgaatagcaagtgctatgaggaagctaagaagctgaagaagatcagcaaccaggccgagtttatcgcctccttctacaacaacgatctgatcaagatcaacggcgagctgtatagagtgatcggcgtgaacaacgacctgctgaaccggatcgaagtgaacatgatcgacatcacctaccgcgagtacctggaaaacatgaacgacaagaggccccccaggatcattaagacaatcgcctccaagacccagagcattaagaagtacagcacagacattctgggcaacctgtatgaagtgaaatctaagaagcaccctcagatcatcaaaaagggc

SEQ ID NO: 142 - DNA, 3156 bp, Artificial Sequence
  chemically synthesized
aagcggaactacatcctgggcctggccatcggcatcaccagcgtgggctacggcatcatcgactacgagacacgggacgtgatcgatgccggcgtgcggctgttcaaagaggccaacgtggaaaacaacgagggcaggcggagcaagagaggcgccagaaggctgaagcggcggaggcggcatagaatccagagagtgaagaagctgctgttcgactacaacctgctgaccgaccacagcgagctgagcggcatcaacccctacgaggccagagtgaagggcctgagccagaagctgagcgaggaagagttctctgccgccctgctgcacctggccaagagaagaggcgtgcacaacgtgaacgaggtggaagaggacaccggcaacgagctgtccaccaaagagcagatcagccggaacagcaaggccctggaagagaaatacgtggccgaactgcagctggaacggctgaagaaagacggcgaagtgcggggcagcatcaacagattcaagaccagcgactacgtgaaagaagccaaacagctgctgaaggtgcagaaggcctaccaccagctggaccagagcttcatcgacacctacatcgacctgctggaaacccggcggacctactatgagggacctggcgagggcagccccttcggctggaaggacatcaaagaatggtacgagatgctgatgggccactgcacctacttccccgaggaactgcggagcgtgaagtacgcctacaacgccgacctgtacaacgccctgaacgacctgaacaatctcgtgatcaccagggacgagaacgagaagctggaatattacgagaagttccagatcatcgagaacgtgttcaagcagaagaagaagcccaccctgaagcagatcgccaaagaaatcctcgtgaacgaagaggatattaagggctacagagtgaccagcaccggcaagcccgagttcaccaacctgaaggtgtaccacgacatcaaggacattaccgcccggaaagagattattgagaacgccgagctgctggatcagattgccaagatcctgaccatctaccagagcagcgaggacatccaggaagaactgaccaatctgaactccgagctgacccaggaagagatcgagcagatctctaatctgaagggctataccggcacccacaacctgagcctgaaggccatcaacctgatcctggacgagctgtggcacaccaacgacaaccagatcgctatcttcaaccggctgaagctggtgcccaagaaggtggacctgtcccagcagaaagagatccccaccaccctggtggacgacttcatcctgagccccgtcgtgaagagaagcttcatccagagcatcaaagtgatcaacgccatcatcaagaagtacggcctgcccaacgacatcattatcgagctggcccgcgagaagaactccaaggacgcccagaaaatgatcaacgagatgcagaagcggaaccggcagaccaacgagcggatcgaggaaatcatccggaccaccggcaaagagaacgccaagtacctgatcgagaagatcaagctgcacgacatgcaggaaggcaagtgcctgtacagcctggaagccatccctctggaagatctgctgaacaaccccttcaactatgaggtggaccacatcatccccagaagcgtgtccttcgacaacagcttcaacaacaaggtgctcgtgaagcaggaagaagccagcaagaagggcaaccggaccccattccagtacctgagcagcagcgacagcaagatcagctacgaaaccttcaagaagcacatcctgaatctggccaagggcaagggcagaatcagcaagaccaagaaagagtatctgctggaagaacgggacatcaacaggttctccgtgcagaaagacttcatcaaccggaacctggtggataccagatacgccaccagaggcctgatgaacctgctgcggagctacttcagagtgaacaacctggacgtgaaagtgaagtccatcaatggcggcttcaccagctttctgcggcggaagtggaagtttaagaaagagcggaacaaggggtacaagcaccacgccgaggacgccctgatcattgccaacgccgatttcatcttcaaagagtggaagaaactggacaaggccaaaaaagtgatggaaaaccagatgttcgaggaaaagcaggccgagagcatgcccgagatcgaaaccgagcaggagtacaaagagatcttcatcaccccccaccagatcaagcacattaaggacttcaaggactacaagtacagccaccgggtggacaagaagcctaatagagagctgattaacgacaccctgtactccacccggaaggacgacaagggcaacaccctgatcgtgaacaatctgaacggcctgtacgacaaggacaatgacaagctgaaaaagctgatcaacaagagccccgaaaagctgctgatgtaccaccacgacccccagacctaccagaaactgaagctgattatggaacagtacggcgacgagaagaatcccctgtacaagtactacgaggaaaccgggaactacctgaccaagtactccaaaaaggacaacggccccgtgatcaagaagattaagtattacggcaacaaactgaacgcccatctggacatcaccgacgactaccccaacagcagaaacaaggtcgtgaagctgtccctgaagccctacagattcgacgtgtacctggacaatggcgtgtacaagttcgtgaccgtgaagaatctggatgtgatcaaaaaagaaaactactacgaagtgaatagcaagtgctatgaggaagctaagaagctgaagaagatcagcaaccaggccgagtttatcgcctccttctacaacaacgatctgatcaagatcaacggcgagctgtatagagtgatcggcgtgaacaacgacctgctgaaccggatcgaagtgaacatgatcgacatcacctaccgcgagtacctggaaaacatgaacgacaagaggccccccaggatcattaagacaatcgcctccaagacccagagcattaagaagtacagcacagacattctgggcaacctgtatgaagtgaaatctaagaagcaccctcagatcatcaaaaagggc

SEQ ID NO: 143 - DNA, 3681 bp, Artificial Sequence
  chemically synthesized
agcaagctggagaagtttacaaactgctactccctgtctaagaccctgaggttcaaggccatccctgtgggcaagacccaggagaacatcgacaataagcggctgctggtggaggacgagaagagagccgaggattataagggcgtgaagaagctgctggatcgctactatctgtcttttatcaacgacgtgctgcacagcatcaagctgaagaatctgaacaattacatcagcctgttccggaagaaaaccagaaccgagaaggagaataaggagctggagaacctggagatcaatctgcggaaggagatcgccaaggccttcaagggcaacgagggctacaagtccctgtttaagaaggatatcatcgagacaatcctgccagagttcctggacgataaggacgagatcgccctggtgaacagcttcaatggctttaccacagccttcaccggcttctttgataacagagagaatatgttttccgaggaggccaagagcacatccatcgccttcaggtgtatcaacgagaatctgacccgctacatctctaatatggacatcttcgagaaggtggacgccatctttgataagcacgaggtgcaggagatcaaggagaagatcctgaacagcgactatgatgtggaggatttctttgagggcgagttctttaactttgtgctgacacaggagggcatcgacgtgtataacgccatcatcggcggcttcgtgaccgagagcggcgagaagatcaagggcctgaacgagtacatcaacctgtataatcagaaaaccaagcagaagctgcctaagtttaagccactgtataagcaggtgctgagcgatcgggagtctctgagcttctacggcgagggctatacatccgatgaggaggtgctggaggtgtttagaaacaccctgaacaagaacagcgagatcttcagctccatcaagaagctggagaagctgttcaagaattttgacgagtactctagcgccggcatctttgtgaagaacggccccgccatcagcacaatctccaaggatatcttcggcgagtggaacgtgatccgggacaagtggaatgccgagtatgacgatatccacctgaagaagaaggccgtggtgaccgagaagtacgaggacgatcggagaaagtccttcaagaagatcggctccttttctctggagcagctgcaggagtacgccgacgccgatctgtctgtggtggagaagctgaaggagatcatcatccagaaggtggatgagatctacaaggtgtatggctcctctgagaagctgttcgacgccgattttgtgctggagaagagcctgaagaagaacgacgccgtggtggccatcatgaaggacctgctggattctgtgaagagcttcgagaattacatcaaggccttctttggcgagggcaaggagacaaacagggacgagtccttctatggcgattttgtgctggcctacgacatcctgctgaaggtggaccacatctacgatgccatccgcaattatgtgacccagaagccctactctaaggataagttcaagctgtattttcagaaccctcagttcatgggcggctgggacaaggataaggagacagactatcgggccaccatcctgagatacggctccaagtactatctggccatcatggataagaagtacgccaagtgcctgcagaagatcgacaaggacgatgtgaacggcaattacgagaagatcaactataagctgctgcccggccctaataagatgctgccaaaggtgttcttttctaagaagtggatggcctactataaccccagcgaggacatccagaagatctacaagaatggcacattcaagaagggcgatatgtttaacctgaatgactgtcacaagctgatcgacttctttaaggatagcatctcccggtatccaaagtggtccaatgcctacgatttcaacttttctgagacagagaagtataaggacatcgccggcttttacagagaggtggaggagcagggctataaggtgagcttcgagtctgccagcaagaaggaggtggataagctggtggaggagggcaagctgtatatgttccagatctataacaaggacttttccgataagtctcacggcacacccaatctgcacaccatgtacttcaagctgctgtttgacgagaacaatcacggacagatcaggctgagcggaggagcagagctgttcatgaggcgcgcctccctgaagaaggaggagctggtggtgcacccagccaactcccctatcgccaacaagaatccagataatcccaagaaaaccacaaccctgtcctacgacgtgtataaggataagaggttttctgaggaccagtacgagctgcacatcccaatcgccatcaataagtgccccaagaacatcttcaagatcaatacagaggtgcgcgtgctgctgaagcacgacgataacccctatgtgatcggcatcgataggggcgagcgcaatctgctgtatatcgtggtggtggacggcaagggcaacatcgtggagcagtattccctgaacgagatcatcaacaacttcaacggcatcaggatcaagacagattaccactctctgctggacaagaaggagaaggagaggttcgaggcccgccagaactggacctccatcgagaatatcaaggagctgaaggccggctatatctctcaggtggtgcacaagatctgcgagctggtggagaagtacgatgccgtgatcgccctggaggacctgaactctggctttaagaatagccgcgtgaaggtggagaagcaggtgtatcagaagttcgagaagatgctgatcgataagctgaactacatggtggacaagaagtctaatccttgtgcaacaggcggcgccctgaagggctatcagatcaccaataagttcgagagctttaagtccatgtctacccagaacggcttcatcttttacatccctgcctggctgacatccaagatcgatccatctaccggctttgtgaacctgctgaaaaccaagtataccagcatcgccgattccaagaagttcatcagctcctttgacaggatcatgtacgtgcccgaggaggatctgttcgagtttgccctggactataagaacttctctcgcacagacgccgattacatcaagaagtggaagctgtactcctacggcaaccggatcagaatcttccggaatcctaagaagaacaacgtgttcgactgggaggaggtgtgcctgaccagcgcctataaggagctgttcaacaagtacggcatcaattatcagcagggcgatatcagagccctgctgtgcgagcagtccgacaaggccttctactctagctttatggccctgatgagcctgatgctgcagatgcggaacagcatcacaggccgcaccgacgtggattttctgatcagccctgtgaagaactccgacggcatcttctacgatagccggaactatgaggcccaggagaatgccatcctgccaaagaacgccgacgccaatggcgcctataacatcgccagaaaggtgctgtgggccatcggccagttcaagaaggccgaggacgagaagctggataaggtgaagatcgccatctctaacaaggagtggctggagtacgcccagaccagcgtgaagcac

SEQ ID NO: 144 - DNA, 3681 bp, Artificial Sequence
  chemically synthesized
agcaagctggagaagtttacaaactgctactccctgtctaagaccctgaggttcaaggccatccctgtgggcaagacccaggagaacatcgacaataagcggctgctggtggaggacgagaagagagccgaggattataagggcgtgaagaagctgctggatcgctactatctgtcttttatcaacgacgtgctgcacagcatcaagctgaagaatctgaacaattacatcagcctgttccggaagaaaaccagaaccgagaaggagaataaggagctggagaacctggagatcaatctgcggaaggagatcgccaaggccttcaagggcaacgagggctacaagtccctgtttaagaaggatatcatcgagacaatcctgccagagttcctggacgataaggacgagatcgccctggtgaacagcttcaatggctttaccacagccttcaccggcttctttgataacagagagaatatgttttccgaggaggccaagagcacatccatcgccttcaggtgtatcaacgagaatctgacccgctacatctctaatatggacatcttcgagaaggtggacgccatctttgataagcacgaggtgcaggagatcaaggagaagatcctgaacagcgactatgatgtggaggatttctttgagggcgagttctttaactttgtgctgacacaggagggcatcgacgtgtataacgccatcatcggcggcttcgtgaccgagagcggcgagaagatcaagggcctgaacgagtacatcaacctgtataatcagaaaaccaagcagaagctgcctaagtttaagccactgtataagcaggtgctgagcgatcgggagtctctgagcttctacggcgagggctatacatccgatgaggaggtgctggaggtgtttagaaacaccctgaacaagaacagcgagatcttcagctccatcaagaagctggagaagctgttcaagaattttgacgagtactctagcgccggcatctttgtgaagaacggccccgccatcagcacaatctccaaggatatcttcggcgagtggaacgtgatccgggacaagtggaatgccgagtatgacgatatccacctgaagaagaaggccgtggtgaccgagaagtacgaggacgatcggagaaagtccttcaagaagatcggctccttttctctggagcagctgcaggagtacgccgacgccgatctgtctgtggtggagaagctgaaggagatcatcatccagaaggtggatgagatctacaaggtgtatggctcctctgagaagctgttcgacgccgattttgtgctggagaagagcctgaagaagaacgacgccgtggtggccatcatgaaggacctgctggattctgtgaagagcttcgagaattacatcaaggccttctttggcgagggcaaggagacaaacagggacgagtccttctatggcgattttgtgctggcctacgacatcctgctgaaggtggaccacatctacgatgccatccgcaattatgtgacccagaagccctactctaaggataagttcaagctgtattttcagaaccctcagttcatgggcggctgggacaaggataaggagacagactatcgggccaccatcctgagatacggctccaagtactatctggccatcatggataagaagtacgccaagtgcctgcagaagatcgacaaggacgatgtgaacggcaattacgagaagatcaactataagctgctgcccggccctaataagatgctgccaaaggtgttcttttctaagaagtggatggcctactataaccccagcgaggacatccagaagatctacaagaatggcacattcaagaagggcgatatgtttaacctgaatgactgtcacaagctgatcgacttctttaaggatagcatctcccggtatccaaagtggtccaatgcctacgatttcaacttttctgagacagagaagtataaggacatcgccggcttttacagagaggtggaggagcagggctataaggtgagcttcgagtctgccagcaagaaggaggtggataagctggtggaggagggcaagctgtatatgttccagatctataacaaggacttttccgataagtctcacggcacacccaatctgcacaccatgtacttcaagctgctgtttgacgagaacaatcacggacagatcaggctgagcggaggagcagagctgttcatgaggcgcgcctccctgaagaaggaggagctggtggtgcacccagccaactcccctatcgccaacaagaatccagataatcccaagaaaaccacaaccctgtcctacgacgtgtataaggataagaggttttctgaggaccagtacgagctgcacatcccaatcgccatcaataagtgccccaagaacatcttcaagatcaatacagaggtgcgcgtgctgctgaagcacgacgataacccctatgtgatcggcatcgctaggggcgagcgcaatctgctgtatatcgtggtggtggacggcaagggcaacatcgtggagcagtattccctgaacgagatcatcaacaacttcaacggcatcaggatcaagacagattaccactctctgctggacaagaaggagaaggagaggttcgaggcccgccagaactggacctccatcgagaatatcaaggagctgaaggccggctatatctctcaggtggtgcacaagatctgcgagctggtggagaagtacgatgccgtgatcgccctggaggacctgaactctggctttaagaatagccgcgtgaaggtggagaagcaggtgtatcagaagttcgagaagatgctgatcgataagctgaactacatggtggacaagaagtctaatccttgtgcaacaggcggcgccctgaagggctatcagatcaccaataagttcgagagctttaagtccatgtctacccagaacggcttcatcttttacatccctgcctggctgacatccaagatcgatccatctaccggctttgtgaacctgctgaaaaccaagtataccagcatcgccgattccaagaagttcatcagctcctttgacaggatcatgtacgtgcccgaggaggatctgttcgagtttgccctggactataagaacttctctcgcacagacgccgattacatcaagaagtggaagctgtactcctacggcaaccggatcagaatcttccggaatcctaagaagaacaacgtgttcgactgggaggaggtgtgcctgaccagcgcctataaggagctgttcaacaagtacggcatcaattatcagcagggcgatatcagagccctgctgtgcgagcagtccgacaaggccttctactctagctttatggccctgatgagcctgatgctgcagatgcggaacagcatcacaggccgcaccgacgtggattttctgatcagccctgtgaagaactccgacggcatcttctacgatagccggaactatgaggcccaggagaatgccatcctgccaaagaacgccgacgccaatggcgcctataacatcgccagaaaggtgctgtgggccatcggccagttcaagaaggccgaggacgagaagctggataaggtgaagatcgccatctctaacaaggagtggctggagtacgcccagaccagcgtgaagcac

SEQ ID NO: 145 - DNA, 27 bp, Artificial Sequence
  chemically synthesized
cccaagaagaagaggaaagtctcgagc

SEQ ID NO: 146 - DNA, 72 bp, Artificial Sequence
  chemically synthesized
gaccctaagaaaaaacgaaaggtagaccctaaaaagaaacggaaagtcgatccgaaaaagaagcggaaggtt

SEQ ID NO: 147 - DNA, 66 bp, Artificial Sequence
  chemically synthesized
gactacaaagaccatgacggtgattataaagatcatgacatcgattacaaggatgacgatgacaag

SEQ ID NO: 148 - DNA, 48 bp, Artificial Sequence
  chemically synthesized
aaaaggccggcggccacgaaaaaggccggccaggcaaagaagaagaaa

SEQ ID NO: 149 - DNA, 117 bp, Artificial Sequence
  chemically synthesized
aactcaaagaaaaggtcactggaggacaacgaaacggaaatcaaagtctccagagacacctggaacactaagaacatgcggtccctggaaccgccacgaagcaagaaacggatacat

SEQ ID NO: 150 - DNA, 96 bp, Artificial Sequence
  chemically synthesized
cccaagaagaagaggaaagtctcgagcgactacaaagaccatgacggtgattataaagatcatgacatcgattacaaggatgacgatgacaagtga

SEQ ID NO: 151 - DNA, 150 bp, Artificial Sequence
  chemically synthesized
gaccctaagaaaaaacgaaaggtagaccctaaaaagaaacggaaagtcgatccgaaaaagaagcggaaggttctcgaggactacaaagaccatgacggtgattataaagatcatgacatcgattacaaggatgacgatgacaagtaatga

SEQ ID NO: 152 - DNA, 126 bp, Artificial Sequence
  chemically synthesized
aaaaggccggcggccacgaaaaaggccggccaggcaaagaagaagaaactcgaggactacaaagaccatgacggtgattataaagatcatgacatcgattacaaggatgacgatgacaagtaatga

SEQ ID NO: 153 - DNA, 201 bp, Artificial Sequence
  chemically synthesized
aaaaggccggcggccacgaaaaaggccggccaggcaaagaagaagaaagttgaccctaagaaaaaacgaaaggtagaccctaaaaagaaacggaaagtcgatccgaaaaagaagcggaaggttctcgaggactacaaagaccatgacggtgattataaagatcatgacatcgattacaaggatgacgatgacaagtaatga

SEQ ID NO: 154 - DNA, 195 bp, Artificial Sequence
  chemically synthesized
aactcaaagaaaaggtcactggaggacaacgaaacggaaatcaaagtctccagagacacctggaacactaagaacatgcggtccctggaaccgccacgaagcaagaaacggatacatctcgaggactacaaagaccatgacggtgattataaagatcatgacatcgattacaaggatgacgatgacaagtaatga

SEQ ID NO: 155 - DNA, 5157 bp, Artificial Sequence
  chemically synthesized
atgcccaaaaagaagaggaaagtcagctcttttttggacggtattgacaaagctcaggacgaacatgaaaagtaccactctaactggagagctatggcctccgattttaatcttccgccggtggtagcgaaagaaatcgttgccagttgcgacaaatgccaattgaagggagaagccatgcatggtcaagtggattgttcccccggaatatggcaactcgattgcacgcatctggaaggcaaggtcatcctcgtagcggtacatgttgcttctggatatattgaggccgaggttataccggcagaaacgggccaagaaacagcgtactttctcctgaagcttgcgggacgctggcctgtgaaaacgattcataccgacaacggttctaactttaccggagcaacagtacgggccgcatgctggtgggccggtataaagcaggaatttgggattccatacaatccgcaaagtcaaggtgtcgtcgagtctatgaataaggaactcaaaaagataattggtcaggttagagatcaagccgaacatctcaagacggcggtccaaatggcagtttttattcacaactttaagaggaaaggtgggattggtggctattcagcaggggagcgaatagtggacataatagcaaccgacatacagactaaggagttgcaaaagcagatcacaaagattcaaaattttcgggtttattaccgcgatagccggaatccgctttggaaaggtcctgcgaaacttttgtggaagggcgagggagctgtcgtcattcaggataacagcgacatcaaggtcgttccgcggcgcaaggcgaaaatcatacgggactatggtaaacaaatggccggggatgactgcgttgcgtcccggcaagacgaggatgggggcgggggaagcggcggtggaggtagtggagggggaggatcagataaaaagtattctattggtttagccatcggcactaattccgttggatgggctgtcataaccgatgaatacaaagtaccttcaaagaaatttaaggtgttggggaacacagaccgtcattcgattaaaaagaatcttatcggtgccctcctattcgatagtggcgaaacggcagaggcgactcgcctgaaacgaaccgctcggagaaggtatacacgtcgcaagaaccgaatatgttacttacaagaaatttttagcaatgagatggccaaagttgacgattctttctttcaccgtttggaagagtccttccttgtcgaagaggacaagaaacatgaacggcaccccatctttggaaacatagtagatgaggtggcatatcatgaaaagtacccaacgatttatcacctcagaaaaaagctagttgactcaactgataaagcggacctgaggttaatctacttggctcttgcccatatgataaagttccgtgggcactttctcattgagggtgatctaaatccggacaactcggatgtcgacaaactgttcatccagttagtacaaacctataatcagttgtttgaagagaaccctataaatgcaagtggcgtggatgcgaaggctattcttagcgcccgcctctctaaatcccgacggctagaaaacctgatcgcacaattacccggagagaagaaaaatgggttgttcggtaaccttatagcgctctcactaggcctgacaccaaattttaagtcgaacttcgacttagctgaagatgccaaattgcagcttagtaaggacacgtacgatgacgatctcgacaatctactggcacaaattggagatcagtatgcggacttatttttggctgccaaaaaccttagcgatgcaatcctcctatctgacatactgagagttaatactgagattaccaaggcgccgttatccgcttcaatgatcaaaaggtacgatgaacatcaccaagacttgacacttctcaaggccctagtccgtcagcaactgcctgagaaatataaggaaatattctttgatcagtcgaaaaacgggtacgcaggttatattgacggcggagcgagtcaagaggaattctacaagtttatcaaacccatattagagaagatggatgggacggaagagttgcttgtaaaactcaatcgcgaagatctactgcgaaagcagcggactttcgacaacggtagcattccacatcaaatccacttaggcgaattgcatgctatacttagaaggcaggaggatttttatccgttcctcaaagacaatcgtgaaaagattgagaaaatcctaacctttcgcataccttactatgtgggacccctggcccgagggaactctcggttcgcatggatgacaagaaagtccgaagaaacgattactccatggaattttgaggaagttgtcgataaaggtgcgtcagctcaatcgttcatcgagaggatgaccaactttgacaagaatttaccgaacgaaaaagtattgcctaagcacagtttactttacgagtatttcacagtgtacaatgaactcacgaaagttaagtatgtcactgagggcatgcgtaaacccgcctttctaagcggagaacagaagaaagcaatagtagatctgttattcaagaccaaccgcaaagtgacagttaagcaattgaaagaggactactttaagaaaattgaatgcttcgattctgtcgagatctccggggtagaagatcgatttaatgcgtcacttggtacgtatcatgacctcctaaagataattaaagataaggacttcctggataacgaagagaatgaagatatcttagaagatatagtgttgactcttaccctctttgaagatcgggaaatgattgaggaaagactaaaaacatacgctcacctgttcgacgataaggttatgaaacagttaaagaggcgtcgctatacgggctggggacgattgtcgcggaaacttatcaacgggataagagacaagcaaagtggtaaaactattctcgattttctaaagagcgacggcttcgccaataggaactttatgcagctgatccatgatgactctttaaccttcaaagaggatatacaaaaggcacaggtttccggacaaggggactcattgcacgaacatattgcgaatcttgctggttcgccagccatcaaaaagggcatactccagacagtcaaagtagtggatgagctagttaaggtcatgggacgtcacaaaccggaaaacattgtaatcgagatggcacgcgaaaatcaaacgactcagaaggggcaaaaaaacagtcgagagcggatgaagagaatagaagagggtattaaagaactgggcagccagatcttaaaggagcatcctgtggaaaatacccaattgcagaacgagaaactttacctctattacctacaaaatggaagggacatgtatgttgatcaggaactggacataaaccgtttatctgattacgacgtcgatgccattgtaccccaatcctttttgaaggacgattcaatcgacaataaagtgcttacacgctcggataagaaccgagggaaaagtgacaatgttccaagcgaggaagtcgtaaagaaaatgaagaactattggcggcagctcctaaatgcgaaactgataacgcaaagaaagttcgataacttaactaaagctgagaggggtggcttgtctgaacttgacaaggccggatttattaaacgtcagctcgtggaaacccgccaaatcacaaagcatgttgcacagatactagattcccgaatgaatacgaaatacgacgagaacgataagctgattcgggaagtcaaagtaatcactttaaagtcaaaattggtgtcggacttcagaaaggattttcaattctataaagttagggagataaataactaccaccatgcgcacgacgcttatcttaatgccgtcgtagggaccgcactcattaagaaatacccgaagctagaaagtgagtttgtgtatggtgattacaaagtttatgacgtccgtaagatgatcgcgaaaagcgaacaggagataggcaaggctacagccaaatacttcttttattctaacattatgaatttctttaagacggaaatcactctggcaaacggagagatacgcaaacgacctttaattgaaaccaatggggagacaggtgaaatcgtatgggataagggccgggacttcgcgacggtgagaaaagttttgtccatgccccaagtcaacatagtaaagaaaactgaggtgcagaccggagggttttcaaaggaatcgattcttccaaaaaggaatagtgataagctcatcgctcgtaaaaaggactgggacccgaaaaagtacggtggcttcgatagccctacagttgcctattctgtcctagtagtggcaaaagttgagaagggaaaatccaagaaactgaagtcagtcaaagaattattggggataacgattatggagcgctcgtcttttgaaaagaaccccatcgacttccttgaggcgaaaggttacaaggaagtaaaaaaggatctcataattaaactaccaaagtatagtctgtttgagttagaaaatggccgaaaacggatgttggctagcgccggagagcttcaaaaggggaacgaactcgcactaccgtctaaatacgtgaatttcctgtatttagcgtcccattacgagaagttgaaaggttcacctgaagataacgaacagaagcaactttttgttgagcagcacaaacattatctcgacgaaatcatagagcaaatttcggaattcagtaagagagtcatcctagctgatgccaatctggacaaagtattaagcgcatacaacaagcacagggataaacccatacgtgagcaggcggaaaatattatccatttgtttactcttaccaacctcggcgctccagccgcattcaagtattttgacacaacgatagatcgcaaacgatacacttctaccaaggaggtgctagacgcgacactgattcaccaatccatcacgggattatatgaaactcggatagatttgtcacagcttgggggtgacaactcaaagaaaaggtcactggaggacaacgaaacggaaatcaaagtctccagagacacctggaacactaagaacatgcggtccctggaaccgccacgaagcaagaaacggatacat

SEQ ID NO: 156 - DNA, 4959 bp, Artificial Sequence
  chemically synthesized
atgcccaaaaagaagaggaaagtcagctcttttttggacggtattgacaaagctcaggacgaacatgaaaagtaccactctaactggagagctatggcctccgattttaatcttccgccggtggtagcgaaagaaatcgttgccagttgcgacaaatgccaattgaagggagaagccatgcatggtcaagtggattgttcccccggaatatggcaactcgattgcacgcatctggaaggcaaggtcatcctcgtagcggtacatgttgcttctggatatattgaggccgaggttataccggcagaaacgggccaagaaacagcgtactttctcctgaagcttgcgggacgctggcctgtgaaaacgattcataccgacaacggttctaactttaccggagcaacagtacgggccgcatgctggtgggccggtataaagcaggaatttgggattccatacaatccgcaaagtcaaggtgtcgtcgagtctatgaataaggaactcaaaaagataattggtcaggttagagatcaagccgaacatctcaagacggcggtccaaatggcagtttttattcacaactttaagaggaaaggtgggattggtggctattcagcaggggagcgaatagtggacataatagcaaccgacatacagactaaggagttgcaaaagcagatcacaaagattcaaaatgggggcgggggaagcggcggtggaggtagtggagggggaggatcagataaaaagtattctattggtttagccatcggcactaattccgttggatgggctgtcataaccgatgaatacaaagtaccttcaaagaaatttaaggtgttggggaacacagaccgtcattcgattaaaaagaatcttatcggtgccctcctattcgatagtggcgaaacggcagaggcgactcgcctgaaacgaaccgctcggagaaggtatacacgtcgcaagaaccgaatatgttacttacaagaaatttttagcaatgagatggccaaagttgacgattctttctttcaccgtttggaagagtccttccttgtcgaagaggacaagaaacatgaacggcaccccatctttggaaacatagtagatgaggtggcatatcatgaaaagtacccaacgatttatcacctcagaaaaaagctagttgactcaactgataaagcggacctgaggttaatctacttggctcttgcccatatgataaagttccgtgggcactttctcattgagggtgatctaaatccggacaactcggatgtcgacaaactgttcatccagttagtacaaacctataatcagttgtttgaagagaaccctataaatgcaagtggcgtggatgcgaaggctattcttagcgcccgcctctctaaatcccgacggctagaaaacctgatcgcacaattacccggagagaagaaaaatgggttgttcggtaaccttatagcgctctcactaggcctgacaccaaattttaagtcgaacttcgacttagctgaagatgccaaattgcagcttagtaaggacacgtacgatgacgatctcgacaatctactggcacaaattggagatcagtatgcggacttatttttggctgccaaaaaccttagcgatgcaatcctcctatctgacatactgagagttaatactgagattaccaaggcgccgttatccgcttcaatgatcaaaaggtacgatgaacatcaccaagacttgacacttctcaaggccctagtccgtcagcaactgcctgagaaatataaggaaatattctttgatcagtcgaaaaacgggtacgcaggttatattgacggcggagcgagtcaagaggaattctacaagtttatcaaacccatattagagaagatggatgggacggaagagttgcttgtaaaactcaatcgcgaagatctactgcgaaagcagcggactttcgacaacggtagcattccacatcaaatccacttaggcgaattgcatgctatacttagaaggcaggaggatttttatccgttcctcaaagacaatcgtgaaaagattgagaaaatcctaacctttcgcataccttactatgtgggacccctggcccgagggaactctcggttcgcatggatgacaagaaagtccgaagaaacgattactccatggaattttgaggaagttgtcgataaaggtgcgtcagctcaatcgttcatcgagaggatgaccaactttgacaagaatttaccgaacgaaaaagtattgcctaagcacagtttactttacgagtatttcacagtgtacaatgaactcacgaaagttaagtatgtcactgagggcatgcgtaaacccgcctttctaagcggagaacagaagaaagcaatagtagatctgttattcaagaccaaccgcaaagtgacagttaagcaattgaaagaggactactttaagaaaattgaatgcttcgattctgtcgagatctccggggtagaagatcgatttaatgcgtcacttggtacgtatcatgacctcctaaagataattaaagataaggacttcctggataacgaagagaatgaagatatcttagaagatatagtgttgactcttaccctctttgaagatcgggaaatgattgaggaaagactaaaaacatacgctcacctgttcgacgataaggttatgaaacagttaaagaggcgtcgctatacgggctggggacgattgtcgcggaaacttatcaacgggataagagacaagcaaagtggtaaaactattctcgattttctaaagagcgacggcttcgccaataggaactttatgcagctgatccatgatgactctttaaccttcaaagaggatatacaaaaggcacaggtttccggacaaggggactcattgcacgaacatattgcgaatcttgctggttcgccagccatcaaaaagggcatactccagacagtcaaagtagtggatgagctagttaaggtcatgggacgtcacaaaccggaaaacattgtaatcgagatggcacgcgaaaatcaaacgactcagaaggggcaaaaaaacagtcgagagcggatgaagagaatagaagagggtattaaagaactgggcagccagatcttaaaggagcatcctgtggaaaatacccaattgcagaacgagaaactttacctctattacctacaaaatggaagggacatgtatgttgatcaggaactggacataaaccgtttatctgattacgacgtcgatgccattgtaccccaatcctttttgaaggacgattcaatcgacaataaagtgcttacacgctcggataagaaccgagggaaaagtgacaatgttccaagcgaggaagtcgtaaagaaaatgaagaactattggcggcagctcctaaatgcgaaactgataacgcaaagaaagttcgataacttaactaaagctgagaggggtggcttgtctgaacttgacaaggccggatttattaaacgtcagctcgtggaaacccgccaaatcacaaagcatgttgcacagatactagattcccgaatgaatacgaaatacgacgagaacgataagctgattcgggaagtcaaagtaatcactttaaagtcaaaattggtgtcggacttcagaaaggattttcaattctataaagttagggagataaataactaccaccatgcgcacgacgcttatcttaatgccgtcgtagggaccgcactcattaagaaatacccgaagctagaaagtgagtttgtgtatggtgattacaaagtttatgacgtccgtaagatgatcgcgaaaagcgaacaggagataggcaaggctacagccaaatacttcttttattctaacattatgaatttctttaagacggaaatcactctggcaaacggagagatacgcaaacgacctttaattgaaaccaatggggagacaggtgaaatcgtatgggataagggccgggacttcgcgacggtgagaaaagttttgtccatgccccaagtcaacatagtaaagaaaactgaggtgcagaccggagggttttcaaaggaatcgattcttccaaaaaggaatagtgataagctcatcgctcgtaaaaaggactgggacccgaaaaagtacggtggcttcgatagccctacagttgcctattctgtcctagtagtggcaaaagttgagaagggaaaatccaagaaactgaagtcagtcaaagaattattggggataacgattatggagcgctcgtcttttgaaaagaaccccatcgacttccttgaggcgaaaggttacaaggaagtaaaaaaggatctcataattaaactaccaaagtatagtctgtttgagttagaaaatggccgaaaacggatgttggctagcgccggagagcttcaaaaggggaacgaactcgcactaccgtctaaatacgtgaatttcctgtatttagcgtcccattacgagaagttgaaaggttcacctgaagataacgaacagaagcaactttttgttgagcagcacaaacattatctcgacgaaatcatagagcaaatttcggaattcagtaagagagtcatcctagctgatgccaatctggacaaagtattaagcgcatacaacaagcacagggataaacccatacgtgagcaggcggaaaatattatccatttgtttactcttaccaacctcggcgctccagccgcattcaagtattttgacacaacgatagatcgcaaacgatacacttctaccaaggaggtgctagacgcgacactgattcaccaatccatcacgggattatatgaaactcggatagatttgtcacagcttgggggtgacaactcaaagaaaaggtcactggaggacaacgaaacggaaatcaaagtctccagagacacctggaacactaagaacatgcggtccctggaaccgccacgaagcaagaaacggatacat

SEQ ID NO: 157 - DNA, 5670 bp, Artificial Sequence
  chemically synthesized
atgcccaaaaagaagaggaaagtcagctctttcctggatggcattgataaagcgcaggatgagcacgaaaaatatcactctaactggcgcgctatggcaagcgatttcaacctcccccccgtggtggctaaagagattgtcgcgtcctgcgacaagtgccaacttaagggtgaagctatgcacggtcaagtcgactgctctccagggatatggcaattggactgcacacaccttgaaggcaaagtaatactggttgccgtacacgtggcttctggatatattgaagccgaggtgattcctgcggaaacaggacaggagacagcctactttctgctgaagctcgcggggagatggccagtcaagacaattcacacagacaatggctctaactttacgggagctacagtgcgggcagcctgctggtgggcggggatcaagcaagaatttggtatcccctacaacccgcagtcccagggtgtggttgagtctatgaataaggaactgaaaaaaatcattggacaggttcgcgatcaagcggagcacctgaagactgcggtacaaatggctgtatttatccataactttaagaggaaaggtggcattggtgggtactcagcgggtgagcggatcgtagacattatagcgacagacatacagacgaaagagcttcagaaacaaataaccaaaatccagaatggcgggggaggatctggcggtggcggctctggtggcggcgggagttttctggacggaattgataaggcacaggacgaacacgaaaagtatcactctaattggagagcgatggcaagtgattttaacttgccccctgttgtagctaaggaaatagttgcaagttgcgataagtgccagcttaaaggcgaggcaatgcacggccaggtcgactgttcacctgggatttggcagctcgactgcactcatcttgaggggaaagtaatccttgtggcagtgcacgtagcgagtggttacatcgaagcagaagtaatacctgctgagacgggacaagagactgcctatttcctgctcaaacttgctggaagatggcccgtcaagacaattcatactgataacggaagcaattttacgggtgcgacagttagagcagcttgttggtgggctgggataaaacaggagtttgggattccatataacccgcaatcacagggggtagtggagagtatgaacaaggagcttaagaaaattattggtcaagtcagagaccaagcggagcatctgaaaactgctgtgcagatggccgtctttatacacaattttaaaaggaagggagggatcggcggttacagcgccggtgagagaatagtagatatcattgccaccgatatccaaaccaaagaacttcaaaaacaaattaccaaaatacaaaatggaggaggtggaagcggaggaggaggaagcgggggagggggctctgataaaaagtattctattggtttagccatcggcactaattccgttggatgggctgtcataaccgatgaatacaaagtaccttcaaagaaatttaaggtgttggggaacacagaccgtcattcgattaaaaagaatcttatcggtgccctcctattcgatagtggcgaaacggcagaggcgactcgcctgaaacgaaccgctcggagaaggtatacacgtcgcaagaaccgaatatgttacttacaagaaatttttagcaatgagatggccaaagttgacgattctttctttcaccgtttggaagagtccttccttgtcgaagaggacaagaaacatgaacggcaccccatctttggaaacatagtagatgaggtggcatatcatgaaaagtacccaacgatttatcacctcagaaaaaagctagttgactcaactgataaagcggacctgaggttaatctacttggctcttgcccatatgataaagttccgtgggcactttctcattgagggtgatctaaatccggacaactcggatgtcgacaaactgttcatccagttagtacaaacctataatcagttgtttgaagagaaccctataaatgcaagtggcgtggatgcgaaggctattcttagcgcccgcctctctaaatcccgacggctagaaaacctgatcgcacaattacccggagagaagaaaaatgggttgttcggtaaccttatagcgctctcactaggcctgacaccaaattttaagtcgaacttcgacttagctgaagatgccaaattgcagcttagtaaggacacgtacgatgacgatctcgacaatctactggcacaaattggagatcagtatgcggacttatttttggctgccaaaaaccttagcgatgcaatcctcctatctgacatactgagagttaatactgagattaccaaggcgccgttatccgcttcaatgatcaaaaggtacgatgaacatcaccaagacttgacacttctcaaggccctagtccgtcagcaactgcctgagaaatataaggaaatattctttgatcagtcgaaaaacgggtacgcaggttatattgacggcggagcgagtcaagaggaattctacaagtttatcaaacccatattagagaagatggatgggacggaagagttgcttgtaaaactcaatcgcgaagatctactgcgaaagcagcggactttcgacaacggtagcattccacatcaaatccacttaggcgaattgcatgctatacttagaaggcaggaggatttttatccgttcctcaaagacaatcgtgaaaagattgagaaaatcctaacctttcgcataccttactatgtgggacccctggcccgagggaactctcggttcgcatggatgacaagaaagtccgaagaaacgattactccatggaattttgaggaagttgtcgataaaggtgcgtcagctcaatcgttcatcgagaggatgaccaactttgacaagaatttaccgaacgaaaaagtattgcctaagcacagtttactttacgagtatttcacagtgtacaatgaactcacgaaagttaagtatgtcactgagggcatgcgtaaacccgcctttctaagcggagaacagaagaaagcaatagtagatctgttattcaagaccaaccgcaaagtgacagttaagcaattgaaagaggactactttaagaaaattgaatgcttcgattctgtcgagatctccggggtagaagatcgatttaatgcgtcacttggtacgtatcatgacctcctaaagataattaaagataaggacttcctggataacgaagagaatgaagatatcttagaagatatagtgttgactcttaccctctttgaagatcgggaaatgattgaggaaagactaaaaacatacgctcacctgttcgacgataaggttatgaaacagttaaagaggcgtcgctatacgggctggggacgattgtcgcggaaacttatcaacgggataagagacaagcaaagtggtaaaactattctcgattttctaaagagcgacggcttcgccaataggaactttatgcagctgatccatgatgactctttaaccttcaaagaggatatacaaaaggcacaggtttccggacaaggggactcattgcacgaacatattgcgaatcttgctggttcgccagccatcaaaaagggcatactccagacagtcaaagtagtggatgagctagttaaggtcatgggacgtcacaaaccggaaaacattgtaatcgagatggcacgcgaaaatcaaacgactcagaaggggcaaaaaaacagtcgagagcggatgaagagaatagaagagggtattaaagaactgggcagccagatcttaaaggagcatcctgtggaaaatacccaattgcagaacgagaaactttacctctattacctacaaaatggaagggacatgtatgttgatcaggaactggacataaaccgtttatctgattacgacgtcgatgccattgtaccccaatcctttttgaaggacgattcaatcgacaataaagtgcttacacgctcggataagaaccgagggaaaagtgacaatgttccaagcgaggaagtcgtaaagaaaatgaagaactattggcggcagctcctaaatgcgaaactgataacgcaaagaaagttcgataacttaactaaagctgagaggggtggcttgtctgaacttgacaaggccggatttattaaacgtcagctcgtggaaacccgccaaatcacaaagcatgttgcacagatactagattcccgaatgaatacgaaatacgacgagaacgataagctgattcgggaagtcaaagtaatcactttaaagtcaaaattggtgtcggacttcagaaaggattttcaattctataaagttagggagataaataactaccaccatgcgcacgacgcttatcttaatgccgtcgtagggaccgcactcattaagaaatacccgaagctagaaagtgagtttgtgtatggtgattacaaagtttatgacgtccgtaagatgatcgcgaaaagcgaacaggagataggcaaggctacagccaaatacttcttttattctaacattatgaatttctttaagacggaaatcactctggcaaacggagagatacgcaaacgacctttaattgaaaccaatggggagacaggtgaaatcgtatgggataagggccgggacttcgcgacggtgagaaaagttttgtccatgccccaagtcaacatagtaaagaaaactgaggtgcagaccggagggttttcaaaggaatcgattcttccaaaaaggaatagtgataagctcatcgctcgtaaaaaggactgggacccgaaaaagtacggtggcttcgatagccctacagttgcctattctgtcctagtagtggcaaaagttgagaagggaaaatccaagaaactgaagtcagtcaaagaattattggggataacgattatggagcgctcgtcttttgaaaagaaccccatcgacttccttgaggcgaaaggttacaaggaagtaaaaaaggatctcataattaaactaccaaagtatagtctgtttgagttagaaaatggccgaaaacggatgttggctagcgccggagagcttcaaaaggggaacgaactcgcactaccgtctaaatacgtgaatttcctgtatttagcgtcccattacgagaagttgaaaggttcacctgaagataacgaacagaagcaactttttgttgagcagcacaaacattatctcgacgaaatcatagagcaaatttcggaattcagtaagagagtcatcctagctgatgccaatctggacaaagtattaagcgcatacaacaagcacagggataaacccatacgtgagcaggcggaaaatattatccatttgtttactcttaccaacctcggcgctccagccgcattcaagtattttgacacaacgatagatcgcaaacgatacacttctaccaaggaggtgctagacgcgacactgattcaccaatccatcacgggattatatgaaactcggatagatttgtcacagcttgggggtgacaactcaaagaaaaggtcactggaggacaacgaaacggaaatcaaagtctccagagacacctggaacactaagaacatgcggtccctggaaccgccacgaagcaagaaacggatacat

SEQ ID NO: 158 - DNA, 5157 bp, Artificial Sequence
  chemically synthesized
atgcccaaaaagaagaggaaagtcagctcttttttggacggtattgacaaagctcaggacgaacatgaaaagtaccactctaactggagagctatggcctccgattttaatcttccgccggtggtagcgaaagaaatcgttgccagttgcgacaaatgccaattgaagggagaagccatgcatggtcaagtggattgttcccccggaatatggcaactcgattgcacgcatctggaaggcaaggtcatcctcgtagcggtacatgttgcttctggatatattggcgccgaggttataccggcagaaacgggccaagaaacagcgtactttctcctgaagcttgcgggacgctggcctgtgaaaacgattcataccgacaacggttctaactttaccggagcaacagtacgggccgcatgctggtgggccggtataaagcaggaatttgggattccatacaatccgcaaagtcaaggtgtcgtcgagtctatgaataaggaactcaaaaagataattggtcaggttagagatcaagccgaacatctcaagacggcggtccaaatggcagtttttattcacaactttaagaggaaaggtgggattggtggctattcagcaggggagcgaatagtggacataatagcaaccgacatacagactaaggagttgcaaaagcagatcacaaagattcaaaattttcgggtttattaccgcgatagccggaatccgctttggaaaggtcctgcgaaacttttgtggaagggcgagggagctgtcgtcattcaggataacagcgacatcaaggtcgttccgcggcgcaaggcgaaaatcatacgggactatggtaaacaaatggccggggatgactgcgttgcgtcccggcaagacgaggatgggggcgggggaagcggcggtggaggtagtggagggggaggatcagataaaaagtattctattggtttagccatcggcactaattccgttggatgggctgtcataaccgatgaatacaaagtaccttcaaagaaatttaaggtgttggggaacacagaccgtcattcgattaaaaagaatcttatcggtgccctcctattcgatagtggcgaaacggcagaggcgactcgcctgaaacgaaccgctcggagaaggtatacacgtcgcaagaaccgaatatgttacttacaagaaatttttagcaatgagatggccaaagttgacgattctttctttcaccgtttggaagagtccttccttgtcgaagaggacaagaaacatgaacggcaccccatctttggaaacatagtagatgaggtggcatatcatgaaaagtacccaacgatttatcacctcagaaaaaagctagttgactcaactgataaagcggacctgaggttaatctacttggctcttgcccatatgataaagttccgtgggcactttctcattgagggtgatctaaatccggacaactcggatgtcgacaaactgttcatccagttagtacaaacctataatcagttgtttgaagagaaccctataaatgcaagtggcgtggatgcgaaggctattcttagcgcccgcctctctaaatcccgacggctagaaaacctgatcgcacaattacccggagagaagaaaaatgggttgttcggtaaccttatagcgctctcactaggcctgacaccaaattttaagtcgaacttcgacttagctgaagatgccaaattgcagcttagtaaggacacgtacgatgacgatctcgacaatctactggcacaaattggagatcagtatgcggacttatttttggctgccaaaaaccttagcgatgcaatcctcctatctgacatactgagagttaatactgagattaccaaggcgccgttatccgcttcaatgatcaaaaggtacgatgaacatcaccaagacttgacacttctcaaggccctagtccgtcagcaactgcctgagaaatataaggaaatattctttgatcagtcgaaaaacgggtacgcaggttatattgacggcggagcgagtcaagaggaattctacaagtttatcaaacccatattagagaagatggatgggacggaagagttgcttgtaaaactcaatcgcgaagatctactgcgaaagcagcggactttcgacaacggtagcattccacatcaaatccacttaggcgaattgcatgctatacttagaaggcaggaggatttttatccgttcctcaaagacaatcgtgaaaagattgagaaaatcctaacctttcgcataccttactatgtgggacccctggcccgagggaactctcggttcgcatggatgacaagaaagtccgaagaaacgattactccatggaattttgaggaagttgtcgataaaggtgcgtcagctcaatcgttcatcgagaggatgaccaactttgacaagaatttaccgaacgaaaaagtattgcctaagcacagtttactttacgagtatttcacagtgtacaatgaactcacgaaagttaagtatgtcactgagggcatgcgtaaacccgcctttctaagcggagaacagaagaaagcaatagtagatctgttattcaagaccaaccgcaaagtgacagttaagcaattgaaagaggactactttaagaaaattgaatgcttcgattctgtcgagatctccggggtagaagatcgatttaatgcgtcacttggtacgtatcatgacctcctaaagataattaaagataaggacttcctggataacgaagagaatgaagatatcttagaagatatagtgttgactcttaccctctttgaagatcgggaaatgattgaggaaagactaaaaacatacgctcacctgttcgacgataaggttatgaaacagttaaagaggcgtcgctatacgggctggggacgattgtcgcggaaacttatcaacgggataagagacaagcaaagtggtaaaactattctcgattttctaaagagcgacggcttcgccaataggaactttatgcagctgatccatgatgactctttaaccttcaaagaggatatacaaaaggcacaggtttccggacaaggggactcattgcacgaacatattgcgaatcttgctggttcgccagccatcaaaaagggcatactccagacagtcaaagtagtggatgagctagttaaggtcatgggacgtcacaaaccggaaaacattgtaatcgagatggcacgcgaaaatcaaacgactcagaaggggcaaaaaaacagtcgagagcggatgaagagaatagaagagggtattaaagaactgggcagccagatcttaaaggagcatcctgtggaaaatacccaattgcagaacgagaaactttacctctattacctacaaaatggaagggacatgtatgttgatcaggaactggacataaaccgtttatctgattacgacgtcgatgccattgtaccccaatcctttttgaaggacgattcaatcgacaataaagtgcttacacgctcggataagaaccgagggaaaagtgacaatgttccaagcgaggaagtcgtaaagaaaatgaagaactattggcggcagctcctaaatgcgaaactgataacgcaaagaaagttcgataacttaactaaagctgagaggggtggcttgtctgaacttgacaaggccggatttattaaacgtcagctcgtggaaacccgccaaatcacaaagcatgttgcacagatactagattcccgaatgaatacgaaatacgacgagaacgataagctgattcgggaagtcaaagtaatcactttaaagtcaaaattggtgtcggacttcagaaaggattttcaattctataaagttagggagataaataactaccaccatgcgcacgacgcttatcttaatgccgtcgtagggaccgcactcattaagaaatacccgaagctagaaagtgagtttgtgtatggtgattacaaagtttatgacgtccgtaagatgatcgcgaaaagcgaacaggagataggcaaggctacagccaaatacttcttttattctaacattatgaatttctttaagacggaaatcactctggcaaacggagagatacgcaaacgacctttaattgaaaccaatggggagacaggtgaaatcgtatgggataagggccgggacttcgcgacggtgagaaaagttttgtccatgccccaagtcaacatagtaaagaaaactgaggtgcagaccggagggttttcaaaggaatcgattcttccaaaaaggaatagtgataagctcatcgctcgtaaaaaggactgggacccgaaaaagtacggtggcttcgatagccctacagttgcctattctgtcctagtagtggcaaaagttgagaagggaaaatccaagaaactgaagtcagtcaaagaattattggggataacgattatggagcgctcgtcttttgaaaagaaccccatcgacttccttgaggcgaaaggttacaaggaagtaaaaaaggatctcataattaaactaccaaagtatagtctgtttgagttagaaaatggccgaaaacggatgttggctagcgccggagagcttcaaaaggggaacgaactcgcactaccgtctaaatacgtgaatttcctgtatttagcgtcccattacgagaagttgaaaggttcacctgaagataacgaacagaagcaactttttgttgagcagcacaaacattatctcgacgaaatcatagagcaaatttcggaattcagtaagagagtcatcctagctgatgccaatctggacaaagtattaagcgcatacaacaagcacagggataaacccatacgtgagcaggcggaaaatattatccatttgtttactcttaccaacctcggcgctccagccgcattcaagtattttgacacaacgatagatcgcaaacgatacacttctaccaaggaggtgctagacgcgacactgattcaccaatccatcacgggattatatgaaactcggatagatttgtcacagcttgggggtgacaactcaaagaaaaggtcactggaggacaacgaaacggaaatcaaagtctccagagacacctggaacactaagaacatgcggtccctggaaccgccacgaagcaagaaacggatacat

SEQ ID NO: 159 - DNA, 4959 bp, Artificial Sequence
  chemically synthesized
atgcccaaaaagaagaggaaagtcagctcttttttggacggtattgacaaagctcaggacgaacatgaaaagtaccactctaactggagagctatggcctccgattttaatcttccgccggtggtagcgaaagaaatcgttgccagttgcgacaaatgccaattgaagggagaagccatgcatggtcaagtggattgttcccccggaatatggcaactcgattgcacgcatctggaaggcaaggtcatcctcgtagcggtacatgttgcttctggatatattggcgccgaggttataccggcagaaacgggccaagaaacagcgtactttctcctgaagcttgcgggacgctggcctgtgaaaacgattcataccgacaacggttctaactttaccggagcaacagtacgggccgcatgctggtgggccggtataaagcaggaatttgggattccatacaatccgcaaagtcaaggtgtcgtcgagtctatgaataaggaactcaaaaagataattggtcaggttagagatcaagccgaacatctcaagacggcggtccaaatggcagtttttattcacaactttaagaggaaaggtgggattggtggctattcagcaggggagcgaatagtggacataatagcaaccgacatacagactaaggagttgcaaaagcagatcacaaagattcaaaatgggggcgggggaagcggcggtggaggtagtggagggggaggatcagataaaaagtattctattggtttagccatcggcactaattccgttggatgggctgtcataaccgatgaatacaaagtaccttcaaagaaatttaaggtgttggggaacacagaccgtcattcgattaaaaagaatcttatcggtgccctcctattcgatagtggcgaaacggcagaggcgactcgcctgaaacgaaccgctcggagaaggtatacacgtcgcaagaaccgaatatgttacttacaagaaatttttagcaatgagatggccaaagttgacgattctttctttcaccgtttggaagagtccttccttgtcgaagaggacaagaaacatgaacggcaccccatctttggaaacatagtagatgaggtggcatatcatgaaaagtacccaacgatttatcacctcagaaaaaagctagttgactcaactgataaagcggacctgaggttaatctacttggctcttgcccatatgataaagttccgtgggcactttctcattgagggtgatctaaatccggacaactcggatgtcgacaaactgttcatccagttagtacaaacctataatcagttgtttgaagagaaccctataaatgcaagtggcgtggatgcgaaggctattcttagcgcccgcctctctaaatcccgacggctagaaaacctgatcgcacaattacccggagagaagaaaaatgggttgttcggtaaccttatagcgctctcactaggcctgacaccaaattttaagtcgaacttcgacttagctgaagatgccaaattgcagcttagtaaggacacgtacgatgacgatctcgacaatctactggcacaaattggagatcagtatgcggacttatttttggctgccaaaaaccttagcgatgcaatcctcctatctgacatactgagagttaatactgagattaccaaggcgccgttatccgcttcaatgatcaaaaggtacgatgaacatcaccaagacttgacacttctcaaggccctagtccgtcagcaactgcctgagaaatataaggaaatattctttgatcagtcgaaaaacgggtacgcaggttatattgacggcggagcgagtcaagaggaattctacaagtttatcaaacccatattagagaagatggatgggacggaagagttgcttgtaaaactcaatcgcgaagatctactgcgaaagcagcggactttcgacaacggtagcattccacatcaaatccacttaggcgaattgcatgctatacttagaaggcaggaggatttttatccgttcctcaaagacaatcgtgaaaagattgagaaaatcctaacctttcgcataccttactatgtgggacccctggcccgagggaactctcggttcgcatggatgacaagaaagtccgaagaaacgattactccatggaattttgaggaagttgtcgataaaggtgcgtcagctcaatcgttcatcgagaggatgaccaactttgacaagaatttaccgaacgaaaaagtattgcctaagcacagtttactttacgagtatttcacagtgtacaatgaactcacgaaagttaagtatgtcactgagggcatgcgtaaacccgcctttctaagcggagaacagaagaaagcaatagtagatctgttattcaagaccaaccgcaaagtgacagttaagcaattgaaagaggactactttaagaaaattgaatgcttcgattctgtcgagatctccggggtagaagatcgatttaatgcgtcacttggtacgtatcatgacctcctaaagataattaaagataaggacttcctggataacgaagagaatgaagatatcttagaagatatagtgttgactcttaccctctttgaagatcgggaaatgattgaggaaagactaaaaacatacgctcacctgttcgacgataaggttatgaaacagttaaagaggcgtcgctatacgggctggggacgattgtcgcggaaacttatcaacgggataagagacaagcaaagtggtaaaactattctcgattttctaaagagcgacggcttcgccaataggaactttatgcagctgatccatgatgactctttaaccttcaaagaggatatacaaaaggcacaggtttccggacaaggggactcattgcacgaacatattgcgaatcttgctggttcgccagccatcaaaaagggcatactccagacagtcaaagtagtggatgagctagttaaggtcatgggacgtcacaaaccggaaaacattgtaatcgagatggcacgcgaaaatcaaacgactcagaaggggcaaaaaaacagtcgagagcggatgaagagaatagaagagggtattaaagaactgggcagccagatcttaaaggagcatcctgtggaaaatacccaattgcagaacgagaaactttacctctattacctacaaaatggaagggacatgtatgttgatcaggaactggacataaaccgtttatctgattacgacgtcgatgccattgtaccccaatcctttttgaaggacgattcaatcgacaataaagtgcttacacgctcggataagaaccgagggaaaagtgacaatgttccaagcgaggaagtcgtaaagaaaatgaagaactattggcggcagctcctaaatgcgaaactgataacgcaaagaaagttcgataacttaactaaagctgagaggggtggcttgtctgaacttgacaaggccggatttattaaacgtcagctcgtggaaacccgccaaatcacaaagcatgttgcacagatactagattcccgaatgaatacgaaatacgacgagaacgataagctgattcgggaagtcaaagtaatcactttaaagtcaaaattggtgtcggacttcagaaaggattttcaattctataaagttagggagataaataactaccaccatgcgcacgacgcttatcttaatgccgtcgtagggaccgcactcattaagaaatacccgaagctagaaagtgagtttgtgtatggtgattacaaagtttatgacgtccgtaagatgatcgcgaaaagcgaacaggagataggcaaggctacagccaaatacttcttttattctaacattatgaatttctttaagacggaaatcactctggcaaacggagagatacgcaaacgacctttaattgaaaccaatggggagacaggtgaaatcgtatgggataagggccgggacttcgcgacggtgagaaaagttttgtccatgccccaagtcaacatagtaaagaaaactgaggtgcagaccggagggttttcaaaggaatcgattcttccaaaaaggaatagtgataagctcatcgctcgtaaaaaggactgggacccgaaaaagtacggtggcttcgatagccctacagttgcctattctgtcctagtagtggcaaaagttgagaagggaaaatccaagaaactgaagtcagtcaaagaattattggggataacgattatggagcgctcgtcttttgaaaagaaccccatcgacttccttgaggcgaaaggttacaaggaagtaaaaaaggatctcataattaaactaccaaagtatagtctgtttgagttagaaaatggccgaaaacggatgttggctagcgccggagagcttcaaaaggggaacgaactcgcactaccgtctaaatacgtgaatttcctgtatttagcgtcccattacgagaagttgaaaggttcacctgaagataacgaacagaagcaactttttgttgagcagcacaaacattatctcgacgaaatcatagagcaaatttcggaattcagtaagagagtcatcctagctgatgccaatctggacaaagtattaagcgcatacaacaagcacagggataaacccatacgtgagcaggcggaaaatattatccatttgtttactcttaccaacctcggcgctccagccgcattcaagtattttgacacaacgatagatcgcaaacgatacacttctaccaaggaggtgctagacgcgacactgattcaccaatccatcacgggattatatgaaactcggatagatttgtcacagcttgggggtgacaactcaaagaaaaggtcactggaggacaacgaaacggaaatcaaagtctccagagacacctggaacactaagaacatgcggtccctggaaccgccacgaagcaagaaacggatacat

SEQ ID NO: 160 - DNA, 5157 bp, Artificial Sequence
  chemically synthesized
atgcccaaaaagaagaggaaagtcagctcttttttggacggtattgacaaagctcaggacgaacatgaaaagtaccactctaactggagagctatggcctccgattttaatcttccgccggtggtagcgaaagaaatcgttgccagttgcgacaaatgccaattgaagggagaagccatgcatggtcaagtggattgttcccccggaatatggcaactcgattgcacgcatctggaaggcaaggtcatcctcgtagcggtacatgttgcttctggatatattttcgccgaggttataccggcagaaacgggccaagaaacagcgtactttctcctgaagcttgcgggacgctggcctgtgaaaacgattcataccgacaacggttctaactttaccggagcaacagtacgggccgcatgctggtgggccggtataaagcaggaatttgggattccatacaatccgcaaagtcaaggtgtcgtcgagtctatgaataaggaactcaaaaagataattggtcaggttagagatcaagccgaacatctcaagacggcggtccaaatggcagtttttattcacaactttaagaggaaaggtgggattggtggctattcagcaggggagcgaatagtggacataatagcaaccgacatacagactaaggagttgcaaaagcagatcacaaagattcaaaattttcgggtttattaccgcgatagccggaatccgctttggaaaggtcctgcgaaacttttgtggaagggcgagggagctgtcgtcattcaggataacagcgacatcaaggtcgttccgcggcgcaaggcgaaaatcatacgggactatggtaaacaaatggccggggatgactgcgttgcgtcccggcaagacgaggatgggggcgggggaagcggcggtggaggtagtggagggggaggatcagataaaaagtattctattggtttagccatcggcactaattccgttggatgggctgtcataaccgatgaatacaaagtaccttcaaagaaatttaaggtgttggggaacacagaccgtcattcgattaaaaagaatcttatcggtgccctcctattcgatagtggcgaaacggcagaggcgactcgcctgaaacgaaccgctcggagaaggtatacacgtcgcaagaaccgaatatgttacttacaagaaatttttagcaatgagatggccaaagttgacgattctttctttcaccgtttggaagagtccttccttgtcgaagaggacaagaaacatgaacggcaccccatctttggaaacatagtagatgaggtggcatatcatgaaaagtacccaacgatttatcacctcagaaaaaagctagttgactcaactgataaagcggacctgaggttaatctacttggctcttgcccatatgataaagttccgtgggcactttctcattgagggtgatctaaatccggacaactcggatgtcgacaaactgttcatccagttagtacaaacctataatcagttgtttgaagagaaccctataaatgcaagtggcgtggatgcgaaggctattcttagcgcccgcctctctaaatcccgacggctagaaaacctgatcgcacaattacccggagagaagaaaaatgggttgttcggtaaccttatagcgctctcactaggcctgacaccaaattttaagtcgaacttcgacttagctgaagatgccaaattgcagcttagtaaggacacgtacgatgacgatctcgacaatctactggcacaaattggagatcagtatgcggacttatttttggctgccaaaaaccttagcgatgcaatcctcctatctgacatactgagagttaatactgagattaccaaggcgccgttatccgcttcaatgatcaaaaggtacgatgaacatcaccaagacttgacacttctcaaggccctagtccgtcagcaactgcctgagaaatataaggaaatattctttgatcagtcgaaaaacgggtacgcaggttatattgacggcggagcgagtcaagaggaattctacaagtttatcaaacccatattagagaagatggatgggacggaagagttgcttgtaaaactcaatcgcgaagatctactgcgaaagcagcggactttcgacaacggtagcattccacatcaaatccacttaggcgaattgcatgctatacttagaaggcaggaggatttttatccgttcctcaaagacaatcgtgaaaagattgagaaaatcctaacctttcgcataccttactatgtgggacccctggcccgagggaactctcggttcgcatggatgacaagaaagtccgaagaaacgattactccatggaattttgaggaagttgtcgataaaggtgcgtcagctcaatcgttcatcgagaggatgaccaactttgacaagaatttaccgaacgaaaaagtattgcctaagcacagtttactttacgagtatttcacagtgtacaatgaactcacgaaagttaagtatgtcactgagggcatgcgtaaacccgcctttctaagcggagaacagaagaaagcaatagtagatctgttattcaagaccaaccgcaaagtgacagttaagcaattgaaagaggactactttaagaaaattgaatgcttcgattctgtcgagatctccggggtagaagatcgatttaatgcgtcacttggtacgtatcatgacctcctaaagataattaaagataaggacttcctggataacgaagagaatgaagatatcttagaagatatagtgttgactcttaccctctttgaagatcgggaaatgattgaggaaagactaaaaacatacgctcacctgttcgacgataaggttatgaaacagttaaagaggcgtcgctatacgggctggggacgattgtcgcggaaacttatcaacgggataagagacaagcaaagtggtaaaactattctcgattttctaaagagcgacggcttcgccaataggaactttatgcagctgatccatgatgactctttaaccttcaaagaggatatacaaaaggcacaggtttccggacaaggggactcattgcacgaacatattgcgaatcttgctggttcgccagccatcaaaaagggcatactccagacagtcaaagtagtggatgagctagttaaggtcatgggacgtcacaaaccggaaaacattgtaatcgagatggcacgcgaaaatcaaacgactcagaaggggcaaaaaaacagtcgagagcggatgaagagaatagaagagggtattaaagaactgggcagccagatcttaaaggagcatcctgtggaaaatacccaattgcagaacgagaaactttacctctattacctacaaaatggaagggacatgtatgttgatcaggaactggacataaaccgtttatctgattacgacgtcgatgccattgtaccccaatcctttttgaaggacgattcaatcgacaataaagtgcttacacgctcggataagaaccgagggaaaagtgacaatgttccaagcgaggaagtcgtaaagaaaatgaagaactattggcggcagctcctaaatgcgaaactgataacgcaaagaaagttcgataacttaactaaagctgagaggggtggcttgtctgaacttgacaaggccggatttattaaacgtcagctcgtggaaacccgccaaatcacaaagcatgttgcacagatactagattcccgaatgaatacgaaatacgacgagaacgataagctgattcgggaagtcaaagtaatcactttaaagtcaaaattggtgtcggacttcagaaaggattttcaattctataaagttagggagataaataactaccaccatgcgcacgacgcttatcttaatgccgtcgtagggaccgcactcattaagaaatacccgaagctagaaagtgagtttgtgtatggtgattacaaagtttatgacgtccgtaagatgatcgcgaaaagcgaacaggagataggcaaggctacagccaaatacttcttttattctaacattatgaatttctttaagacggaaatcactctggcaaacggagagatacgcaaacgacctttaattgaaaccaatggggagacaggtgaaatcgtatgggataagggccgggacttcgcgacggtgagaaaagttttgtccatgccccaagtcaacatagtaaagaaaactgaggtgcagaccggagggttttcaaaggaatcgattcttccaaaaaggaatagtgataagctcatcgctcgtaaaaaggactgggacccgaaaaagtacggtggcttcgatagccctacagttgcctattctgtcctagtagtggcaaaagttgagaagggaaaatccaagaaactgaagtcagtcaaagaattattggggataacgattatggagcgctcgtcttttgaaaagaaccccatcgacttccttgaggcgaaaggttacaaggaagtaaaaaaggatctcataattaaactaccaaagtatagtctgtttgagttagaaaatggccgaaaacggatgttggctagcgccggagagcttcaaaaggggaacgaactcgcactaccgtctaaatacgtgaatttcctgtatttagcgtcccattacgagaagttgaaaggttcacctgaagataacgaacagaagcaactttttgttgagcagcacaaacattatctcgacgaaatcatagagcaaatttcggaattcagtaagagagtcatcctagctgatgccaatctggacaaagtattaagcgcatacaacaagcacagggataaacccatacgtgagcaggcggaaaatattatccatttgtttactcttaccaacctcggcgctccagccgcattcaagtattttgacacaacgatagatcgcaaacgatacacttctaccaaggaggtgctagacgcgacactgattcaccaatccatcacgggattatatgaaactcggatagatttgtcacagcttgggggtgacaactcaaagaaaaggtcactggaggacaacgaaacggaaatcaaagtctccagagacacctggaacactaagaacatgcggtccctggaaccgccacgaagcaagaaacggatacat

SEQ ID NO: 161 - DNA, 4959 bp, Artificial Sequence
  chemically synthesized
atgcccaaaaagaagaggaaagtcagctcttttttggacggtattgacaaagctcaggacgaacatgaaaagtaccactctaactggagagctatggcctccgattttaatcttccgccggtggtagcgaaagaaatcgttgccagttgcgacaaatgccaattgaagggagaagccatgcatggtcaagtggattgttcccccggaatatggcaactcgattgcacgcatctggaaggcaaggtcatcctcgtagcggtacatgttgcttctggatatattttcgccgaggttataccggcagaaacgggccaagaaacagcgtactttctcctgaagcttgcgggacgctggcctgtgaaaacgattcataccgacaacggttctaactttaccggagcaacagtacgggccgcatgctggtgggccggtataaagcaggaatttgggattccatacaatccgcaaagtcaaggtgtcgtcgagtctatgaataaggaactcaaaaagataattggtcaggttagagatcaagccgaacatctcaagacggcggtccaaatggcagtttttattcacaactttaagaggaaaggtgggattggtggctattcagcaggggagcgaatagtggacataatagcaaccgacatacagactaaggagttgcaaaagcagatcacaaagattcaaaatgggggcgggggaagcggcggtggaggtagtggagggggaggatcagataaaaagtattctattggtttagccatcggcactaattccgttggatgggctgtcataaccgatgaatacaaagtaccttcaaagaaatttaaggtgttggggaacacagaccgtcattcgattaaaaagaatcttatcggtgccctcctattcgatagtggcgaaacggcagaggcgactcgcctgaaacgaaccgctcggagaaggtatacacgtcgcaagaaccgaatatgttacttacaagaaatttttagcaatgagatggccaaagttgacgattctttctttcaccgtttggaagagtccttccttgtcgaagaggacaagaaacatgaacggcaccccatctttggaaacatagtagatgaggtggcatatcatgaaaagtacccaacgatttatcacctcagaaaaaagctagttgactcaactgataaagcggacctgaggttaatctacttggctcttgcccatatgataaagttccgtgggcactttctcattgagggtgatctaaatccggacaactcggatgtcgacaaactgttcatccagttagtacaaacctataatcagttgtttgaagagaaccctataaatgcaagtggcgtggatgcgaaggctattcttagcgcccgcctctctaaatcccgacggctagaaaacctgatcgcacaattacccggagagaagaaaaatgggttgttcggtaaccttatagcgctctcactaggcctgacaccaaattttaagtcgaacttcgacttagctgaagatgccaaattgcagcttagtaaggacacgtacgatgacgatctcgacaatctactggcacaaattggagatcagtatgcggacttatttttggctgccaaaaaccttagcgatgcaatcctcctatctgacatactgagagttaatactgagattaccaaggcgccgttatccgcttcaatgatcaaaaggtacgatgaacatcaccaagacttgacacttctcaaggccctagtccgtcagcaactgcctgagaaatataaggaaatattctttgatcagtcgaaaaacgggtacgcaggttatattgacggcggagcgagtcaagaggaattctacaagtttatcaaacccatattagagaagatggatgggacggaagagttgcttgtaaaactcaatcgcgaagatctactgcgaaagcagcggactttcgacaacggtagcattccacatcaaatccacttaggcgaattgcatgctatacttagaaggcaggaggatttttatccgttcctcaaagacaatcgtgaaaagattgagaaaatcctaacctttcgcataccttactatgtgggacccctggcccgagggaactctcggttcgcatggatgacaagaaagtccgaagaaacgattactccatggaattttgaggaagttgtcgataaaggtgcgtcagctcaatcgttcatcgagaggatgaccaactttgacaagaatttaccgaacgaaaaagtattgcctaagcacagtttactttacgagtatttcacagtgtacaatgaactcacgaaagttaagtatgtcactgagggcatgcgtaaacccgcctttctaagcggagaacagaagaaagcaatagtagatctgttattcaagaccaaccgcaaagtgacagttaagcaattgaaagaggactactttaagaaaattgaatgcttcgattctgtcgagatctccggggtagaagatcgatttaatgcgtcacttggtacgtatcatgacctcctaaagataattaaagataaggacttcctggataacgaagagaatgaagatatcttagaagatatagtgttgactcttaccctctttgaagatcgggaaatgattgaggaaagactaaaaacatacgctcacctgttcgacgataaggttatgaaacagttaaagaggcgtcgctatacgggctggggacgattgtcgcggaaacttatcaacgggataagagacaagcaaagtggtaaaactattctcgattttctaaagagcgacggcttcgccaataggaactttatgcagctgatccatgatgactctttaaccttcaaagaggatatacaaaaggcacaggtttccggacaaggggactcattgcacgaacatattgcgaatcttgctggttcgccagccatcaaaaagggcatactccagacagtcaaagtagtggatgagctagttaaggtcatgggacgtcacaaaccggaaaacattgtaatcgagatggcacgcgaaaatcaaacgactcagaaggggcaaaaaaacagtcgagagcggatgaagagaatagaagagggtattaaagaactgggcagccagatcttaaaggagcatcctgtggaaaatacccaattgcagaacgagaaactttacctctattacctacaaaatggaagggacatgtatgttgatcaggaactggacataaaccgtttatctgattacgacgtcgatgccattgtaccccaatcctttttgaaggacgattcaatcgacaataaagtgcttacacgctcggataagaaccgagggaaaagtgacaatgttccaagcgaggaagtcgtaaagaaaatgaagaactattggcggcagctcctaaatgcgaaactgataacgcaaagaaagttcgataacttaactaaagctgagaggggtggcttgtctgaacttgacaaggccggatttattaaacgtcagctcgtggaaacccgccaaatcacaaagcatgttgcacagatactagattcccgaatgaatacgaaatacgacgagaacgataagctgattcgggaagtcaaagtaatcactttaaagtcaaaattggtgtcggacttcagaaaggattttcaattctataaagttagggagataaataactaccaccatgcgcacgacgcttatcttaatgccgtcgtagggaccgcactcattaagaaatacccgaagctagaaagtgagtttgtgtatggtgattacaaagtttatgacgtccgtaagatgatcgcgaaaagcgaacaggagataggcaaggctacagccaaatacttcttttattctaacattatgaatttctttaagacggaaatcactctggcaaacggagagatacgcaaacgacctttaattgaaaccaatggggagacaggtgaaatcgtatgggataagggccgggacttcgcgacggtgagaaaagttttgtccatgccccaagtcaacatagtaaagaaaactgaggtgcagaccggagggttttcaaaggaatcgattcttccaaaaaggaatagtgataagctcatcgctcgtaaaaaggactgggacccgaaaaagtacggtggcttcgatagccctacagttgcctattctgtcctagtagtggcaaaagttgagaagggaaaatccaagaaactgaagtcagtcaaagaattattggggataacgattatggagcgctcgtcttttgaaaagaaccccatcgacttccttgaggcgaaaggttacaaggaagtaaaaaaggatctcataattaaactaccaaagtatagtctgtttgagttagaaaatggccgaaaacggatgttggctagcgccggagagcttcaaaaggggaacgaactcgcactaccgtctaaatacgtgaatttcctgtatttagcgtcccattacgagaagttgaaaggttcacctgaagataacgaacagaagcaactttttgttgagcagcacaaacattatctcgacgaaatcatagagcaaatttcggaattcagtaagagagtcatcctagctgatgccaatctggacaaagtattaagcgcatacaacaagcacagggataaacccatacgtgagcaggcggaaaatattatccatttgtttactcttaccaacctcggcgctccagccgcattcaagtattttgacacaacgatagatcgcaaacgatacacttctaccaaggaggtgctagacgcgacactgattcaccaatccatcacgggattatatgaaactcggatagatttgtcacagcttgggggtgacaactcaaagaaaaggtcactggaggacaacgaaacggaaatcaaagtctccagagacacctggaacactaagaacatgcggtccctggaaccgccacgaagcaagaaacggatacat

SEQ ID NO: 162 - DNA, 5157 bp, Artificial Sequence
  chemically synthesized
atgcccaaaaagaagaggaaagtcagctcttttttggacggtattgacaaagctcaggacgaacatgaaaagtaccactctaactggagagctatggcctccgattttaatcttccgccggtggtagcgaaagaaatcgttgccagttgcgacaaatgccaattgaagggagaagccatgcatggtcaagtggattgttcccccggaatatggcaactcgattgcacgcatctggaaggcaaggtcatcctcgtagcggtacatgttgcttctggatatattgaggccgaggttataccggcagaaacgggccaagaaacagcgtactttctcctgaagcttgcgggacgctggcctgtgaaaacgattcataccaacaacggttctaactttaccggagcaacagtacgggccgcatgctggtgggccggtataaagcaggaatttgggattccatacaatccgcaaagtcaaggtgtcgtcgagtctatgaataaggaactcaaaaagataattggtcaggttagagatcaagccgaacatctcaagacggcggtccaaatggcagtttttattcacaactttaagaggaaaggtgggattggtggctattcagcaggggagcgaatagtggacataatagcaaccgacatacagactaaggagttgcaaaagcagatcacaaagattcaaaattttcgggtttattaccgcgatagccggaatccgctttggaaaggtcctgcgaaacttttgtggaagggcgagggagctgtcgtcattcaggataacagcgacatcaaggtcgttccgcggcgcaaggcgaaaatcatacgggactatggtaaacaaatggccggggatgactgcgttgcgtcccggcaagacgaggatgggggcgggggaagcggcggtggaggtagtggagggggaggatcagataaaaagtattctattggtttagccatcggcactaattccgttggatgggctgtcataaccgatgaatacaaagtaccttcaaagaaatttaaggtgttggggaacacagaccgtcattcgattaaaaagaatcttatcggtgccctcctattcgatagtggcgaaacggcagaggcgactcgcctgaaacgaaccgctcggagaaggtatacacgtcgcaagaaccgaatatgttacttacaagaaatttttagcaatgagatggccaaagttgacgattctttctttcaccgtttggaagagtccttccttgtcgaagaggacaagaaacatgaacggcaccccatctttggaaacatagtagatgaggtggcatatcatgaaaagtacccaacgatttatcacctcagaaaaaagctagttgactcaactgataaagcggacctgaggttaatctacttggctcttgcccatatgataaagttccgtgggcactttctcattgagggtgatctaaatccggacaactcggatgtcgacaaactgttcatccagttagtacaaacctataatcagttgtttgaagagaaccctataaatgcaagtggcgtggatgcgaaggctattcttagcgcccgcctctctaaatcccgacggctagaaaacctgatcgcacaattacccggagagaagaaaaatgggttgttcggtaaccttatagcgctctcactaggcctgacaccaaattttaagtcgaacttcgacttagctgaagatgccaaattgcagcttagtaaggacacgtacgatgacgatctcgacaatctactggcacaaattggagatcagtatgcggacttatttttggctgccaaaaaccttagcgatgcaatcctcctatctgacatactgagagttaatactgagattaccaaggcgccgttatccgcttcaatgatcaaaaggtacgatgaacatcaccaagacttgacacttctcaaggccctagtccgtcagcaactgcctgagaaatataaggaaatattctttgatcagtcgaaaaacgggtacgcaggttatattgacggcggagcgagtcaagaggaattctacaagtttatcaaacccatattagagaagatggatgggacggaagagttgcttgtaaaactcaatcgcgaagatctactgcgaaagcagcggactttcgacaacggtagcattccacatcaaatccacttaggcgaattgcatgctatacttagaaggcaggaggatttttatccgttcctcaaagacaatcgtgaaaagattgagaaaatcctaacctttcgcataccttactatgtgggacccctggcccgagggaactctcggttcgcatggatgacaagaaagtccgaagaaacgattactccatggaattttgaggaagttgtcgataaaggtgcgtcagctcaatcgttcatcgagaggatgaccaactttgacaagaatttaccgaacgaaaaagtattgcctaagcacagtttactttacgagtatttcacagtgtacaatgaactcacgaaagttaagtatgtcactgagggcatgcgtaaacccgcctttctaagcggagaacagaagaaagcaatagtagatctgttattcaagaccaaccgcaaagtgacagttaagcaattgaaagaggactactttaagaaaattgaatgcttcgattctgtcgagatctccggggtagaagatcgatttaatgcgtcacttggtacgtatcatgacctcctaaagataattaaagataaggacttcctggataacgaagagaatgaagatatcttagaagatatagtgttgactcttaccctctttgaagatcgggaaatgattgaggaaagactaaaaacatacgctcacctgttcgacgataaggttatgaaacagttaaagaggcgtcgctatacgggctggggacgattgtcgcggaaacttatcaacgggataagagacaagcaaagtggtaaaactattctcgattttctaaagagcgacggcttcgccaataggaactttatgcagctgatccatgatgactctttaaccttcaaagaggatatacaaaaggcacaggtttccggacaaggggactcattgcacgaacatattgcgaatcttgctggttcgccagccatcaaaaagggcatactccagacagtcaaagtagtggatgagctagttaaggtcatgggacgtcacaaaccggaaaacattgtaatcgagatggcacgcgaaaatcaaacgactcagaaggggcaaaaaaacagtcgagagcggatgaagagaatagaagagggtattaaagaactgggcagccagatcttaaaggagcatcctgtggaaaatacccaattgcagaacgagaaactttacctctattacctacaaaatggaagggacatgtatgttgatcaggaactggacataaaccgtttatctgattacgacgtcgatgccattgtaccccaatcctttttgaaggacgattcaatcgacaataaagtgcttacacgctcggataagaaccgagggaaaagtgacaatgttccaagcgaggaagtcgtaaagaaaatgaagaactattggcggcagctcctaaatgcgaaactgataacgcaaagaaagttcgataacttaactaaagctgagaggggtggcttgtctgaacttgacaaggccggatttattaaacgtcagctcgtggaaacccgccaaatcacaaagcatgttgcacagatactagattcccgaatgaatacgaaatacgacgagaacgataagctgattcgggaagtcaaagtaatcactttaaagtcaaaattggtgtcggacttcagaaaggattttcaattctataaagttagggagataaataactaccaccatgcgcacgacgcttatcttaatgccgtcgtagggaccgcactcattaagaaatacccgaagctagaaagtgagtttgtgtatggtgattacaaagtttatgacgtccgtaagatgatcgcgaaaagcgaacaggagataggcaaggctacagccaaatacttcttttattctaacattatgaatttctttaagacggaaatcactctggcaaacggagagatacgcaaacgacctttaattgaaaccaatggggagacaggtgaaatcgtatgggataagggccgggacttcgcgacggtgagaaaagttttgtccatgccccaagtcaacatagtaaagaaaactgaggtgcagaccggagggttttcaaaggaatcgattcttccaaaaaggaatagtgataagctcatcgctcgtaaaaaggactgggacccgaaaaagtacggtggcttcgatagccctacagttgcctattctgtcctagtagtggcaaaagttgagaagggaaaatccaagaaactgaagtcagtcaaagaattattggggataacgattatggagcgctcgtcttttgaaaagaaccccatcgacttccttgaggcgaaaggttacaaggaagtaaaaaaggatctcataattaaactaccaaagtatagtctgtttgagttagaaaatggccgaaaacggatgttggctagcgccggagagcttcaaaaggggaacgaactcgcactaccgtctaaatacgtgaatttcctgtatttagcgtcccattacgagaagttgaaaggttcacctgaagataacgaacagaagcaactttttgttgagcagcacaaacattatctcgacgaaatcatagagcaaatttcggaattcagtaagagagtcatcctagctgatgccaatctggacaaagtattaagcgcatacaacaagcacagggataaacccatacgtgagcaggcggaaaatattatccatttgtttactcttaccaacctcggcgctccagccgcattcaagtattttgacacaacgatagatcgcaaacgatacacttctaccaaggaggtgctagacgcgacactgattcaccaatccatcacgggattatatgaaactcggatagatttgtcacagcttgggggtgacaactcaaagaaaaggtcactggaggacaacgaaacggaaatcaaagtctccagagacacctggaacactaagaacatgcggtccctggaaccgccacgaagcaagaaacggatacat

SEQ ID NO: 163 - DNA, 4959 bp, Artificial Sequence
  chemically synthesized
atgcccaaaaagaagaggaaagtcagctcttttttggacggtattgacaaagctcaggacgaacatgaaaagtaccactctaactggagagctatggcctccgattttaatcttccgccggtggtagcgaaagaaatcgttgccagttgcgacaaatgccaattgaagggagaagccatgcatggtcaagtggattgttcccccggaatatggcaactcgattgcacgcatctggaaggcaaggtcatcctcgtagcggtacatgttgcttctggatatattgaggccgaggttataccggcagaaacgggccaagaaacagcgtactttctcctgaagcttgcgggacgctggcctgtgaaaacgattcataccaacaacggttctaactttaccggagcaacagtacgggccgcatgctggtgggccggtataaagcaggaatttgggattccatacaatccgcaaagtcaaggtgtcgtcgagtctatgaataaggaactcaaaaagataattggtcaggttagagatcaagccgaacatctcaagacggcggtccaaatggcagtttttattcacaactttaagaggaaaggtgggattggtggctattcagcaggggagcgaatagtggacataatagcaaccgacatacagactaaggagttgcaaaagcagatcacaaagattcaaaatgggggcgggggaagcggcggtggaggtagtggagggggaggatcagataaaaagtattctattggtttagccatcggcactaattccgttggatgggctgtcataaccgatgaatacaaagtaccttcaaagaaatttaaggtgttggggaacacagaccgtcattcgattaaaaagaatcttatcggtgccctcctattcgatagtggcgaaacggcagaggcgactcgcctgaaacgaaccgctcggagaaggtatacacgtcgcaagaaccgaatatgttacttacaagaaatttttagcaatgagatggccaaagttgacgattctttctttcaccgtttggaagagtccttccttgtcgaagaggacaagaaacatgaacggcaccccatctttggaaacatagtagatgaggtggcatatcatgaaaagtacccaacgatttatcacctcagaaaaaagctagttgactcaactgataaagcggacctgaggttaatctacttggctcttgcccatatgataaagttccgtgggcactttctcattgagggtgatctaaatccggacaactcggatgtcgacaaactgttcatccagttagtacaaacctataatcagttgtttgaagagaaccctataaatgcaagtggcgtggatgcgaaggctattcttagcgcccgcctctctaaatcccgacggctagaaaacctgatcgcacaattacccggagagaagaaaaatgggttgttcggtaaccttatagcgctctcactaggcctgacaccaaattttaagtcgaacttcgacttagctgaagatgccaaattgcagcttagtaaggacacgtacgatgacgatctcgacaatctactggcacaaattggagatcagtatgcggacttatttttggctgccaaaaaccttagcgatgcaatcctcctatctgacatactgagagttaatactgagattaccaaggcgccgttatccgcttcaatgatcaaaaggtacgatgaacatcaccaagacttgacacttctcaaggccctagtccgtcagcaactgcctgagaaatataaggaaatattctttgatcagtcgaaaaacgggtacgcaggttatattgacggcggagcgagtcaagaggaattctacaagtttatcaaacccatattagagaagatggatgggacggaagagttgcttgtaaaactcaatcgcgaagatctactgcgaaagcagcggactttcgacaacggtagcattccacatcaaatccacttaggcgaattgcatgctatacttagaaggcaggaggatttttatccgttcctcaaagacaatcgtgaaaagattgagaaaatcctaacctttcgcataccttactatgtgggacccctggcccgagggaactctcggttcgcatggatgacaagaaagtccgaagaaacgattactccatggaattttgaggaagttgtcgataaaggtgcgtcagctcaatcgttcatcgagaggatgaccaactttgacaagaatttaccgaacgaaaaagtattgcctaagcacagtttactttacgagtatttcacagtgtacaatgaactcacgaaagttaagtatgtcactgagggcatgcgtaaacccgcctttctaagcggagaacagaagaaagcaatagtagatctgttattcaagaccaaccgcaaagtgacagttaagcaattgaaagaggactactttaagaaaattgaatgcttcgattctgtcgagatctccggggtagaagatcgatttaatgcgtcacttggtacgtatcatgacctcctaaagataattaaagataaggacttcctggataacgaagagaatgaagatatcttagaagatatagtgttgactcttaccctctttgaagatcgggaaatgattgaggaaagactaaaaacatacgctcacctgttcgacgataaggttatgaaacagttaaagaggcgtcgctatacgggctggggacgattgtcgcggaaacttatcaacgggataagagacaagcaaagtggtaaaactattctcgattttctaaagagcgacggcttcgccaataggaactttatgcagctgatccatgatgactctttaaccttcaaagaggatatacaaaaggcacaggtttccggacaaggggactcattgcacgaacatattgcgaatcttgctggttcgccagccatcaaaaagggcatactccagacagtcaaagtagtggatgagctagttaaggtcatgggacgtcacaaaccggaaaacattgtaatcgagatggcacgcgaaaatcaaacgactcagaaggggcaaaaaaacagtcgagagcggatgaagagaatagaagagggtattaaagaactgggcagccagatcttaaaggagcatcctgtggaaaatacccaattgcagaacgagaaactttacctctattacctacaaaatggaagggacatgtatgttgatcaggaactggacataaaccgtttatctgattacgacgtcgatgccattgtaccccaatcctttttgaaggacgattcaatcgacaataaagtgcttacacgctcggataagaaccgagggaaaagtgacaatgttccaagcgaggaagtcgtaaagaaaatgaagaactattggcggcagctcctaaatgcgaaactgataacgcaaagaaagttcgataacttaactaaagctgagaggggtggcttgtctgaacttgacaaggccggatttattaaacgtcagctcgtggaaacccgccaaatcacaaagcatgttgcacagatactagattcccgaatgaatacgaaatacgacgagaacgataagctgattcgggaagtcaaagtaatcactttaaagtcaaaattggtgtcggacttcagaaaggattttcaattctataaagttagggagataaataactaccaccatgcgcacgacgcttatcttaatgccgtcgtagggaccgcactcattaagaaatacccgaagctagaaagtgagtttgtgtatggtgattacaaagtttatgacgtccgtaagatgatcgcgaaaagcgaacaggagataggcaaggctacagccaaatacttcttttattctaacattatgaatttctttaagacggaaatcactctggcaaacggagagatacgcaaacgacctttaattgaaaccaatggggagacaggtgaaatcgtatgggataagggccgggacttcgcgacggtgagaaaagttttgtccatgccccaagtcaacatagtaaagaaaactgaggtgcagaccggagggttttcaaaggaatcgattcttccaaaaaggaatagtgataagctcatcgctcgtaaaaaggactgggacccgaaaaagtacggtggcttcgatagccctacagttgcctattctgtcctagtagtggcaaaagttgagaagggaaaatccaagaaactgaagtcagtcaaagaattattggggataacgattatggagcgctcgtcttttgaaaagaaccccatcgacttccttgaggcgaaaggttacaaggaagtaaaaaaggatctcataattaaactaccaaagtatagtctgtttgagttagaaaatggccgaaaacggatgttggctagcgccggagagcttcaaaaggggaacgaactcgcactaccgtctaaatacgtgaatttcctgtatttagcgtcccattacgagaagttgaaaggttcacctgaagataacgaacagaagcaactttttgttgagcagcacaaacattatctcgacgaaatcatagagcaaatttcggaattcagtaagagagtcatcctagctgatgccaatctggacaaagtattaagcgcatacaacaagcacagggataaacccatacgtgagcaggcggaaaatattatccatttgtttactcttaccaacctcggcgctccagccgcattcaagtattttgacacaacgatagatcgcaaacgatacacttctaccaaggaggtgctagacgcgacactgattcaccaatccatcacgggattatatgaaactcggatagatttgtcacagcttgggggtgacaactcaaagaaaaggtcactggaggacaacgaaacggaaatcaaagtctccagagacacctggaacactaagaacatgcggtccctggaaccgccacgaagcaagaaacggatacat

SEQ ID NO: 164 - DNA, 5157 bp, Artificial Sequence
  chemically synthesized
atgcccaaaaagaagaggaaagtcagctcttttttggacggtattgacaaagctcaggacgaacatgaaaagtaccactctaactggagagctatggcctccgattttaatcttccgccggtggtagcgaaagaaatcgttgccagttgcgacaaatgccaattgaagggagaagccatgcatggtcaagtggattgttcccccggaatatggcaactcgattgcacgcatctggaaggcaaggtcatcctcgtagcggtacatgttgcttctggatatattgaggccgaggttataccggcagaaacgggccaagaaacagcgtactttctcctgaagcttgcgggacgctggcctgtgaaaacgattcataccgacaacggttctaactttaccggagcaacagtacgggccgcatgctggtgggccggtataaagcaggaatttgggattccatacaatccgcaaagtcaaggtgtcgtcgagtctatgaataaggaactcaaaaagataattggtcaggttagagatcaagccgaacatctcaagacggcggtccaaatggcagtttttattcacaacaagaagaggaaaggtgggattggtggctattcagcaggggagcgaatagtggacataatagcaaccgacatacagactaaggagttgcaaaagcagatcacaaagattcaaaattttcgggtttattaccgcgatagccggaatccgctttggaaaggtcctgcgaaacttttgtggaagggcgagggagctgtcgtcattcaggataacagcgacatcaaggtcgttccgcggcgcaaggcgaaaatcatacgggactatggtaaacaaatggccggggatgacagcgttgcgtcccggcaagacgaggatgggggcgggggaagcggcggtggaggtagtggagggggaggatcagataaaaagtattctattggtttagccatcggcactaattccgttggatgggctgtcataaccgatgaatacaaagtaccttcaaagaaatttaaggtgttggggaacacagaccgtcattcgattaaaaagaatcttatcggtgccctcctattcgatagtggcgaaacggcagaggcgactcgcctgaaacgaaccgctcggagaaggtatacacgtcgcaagaaccgaatatgttacttacaagaaatttttagcaatgagatggccaaagttgacgattctttctttcaccgtttggaagagtccttccttgtcgaagaggacaagaaacatgaacggcaccccatctttggaaacatagtagatgaggtggcatatcatgaaaagtacccaacgatttatcacctcagaaaaaagctagttgactcaactgataaagcggacctgaggttaatctacttggctcttgcccatatgataaagttccgtgggcactttctcattgagggtgatctaaatccggacaactcggatgtcgacaaactgttcatccagttagtacaaacctataatcagttgtttgaagagaaccctataaatgcaagtggcgtggatgcgaaggctattcttagcgcccgcctctctaaatcccgacggctagaaaacctgatcgcacaattacccggagagaagaaaaatgggttgttcggtaaccttatagcgctctcactaggcctgacaccaaattttaagtcgaacttcgacttagctgaagatgccaaattgcagcttagtaaggacacgtacgatgacgatctcgacaatctactggcacaaattggagatcagtatgcggacttatttttggctgccaaaaaccttagcgatgcaatcctcctatctgacatactgagagttaatactgagattaccaaggcgccgttatccgcttcaatgatcaaaaggtacgatgaacatcaccaagacttgacacttctcaaggccctagtccgtcagcaactgcctgagaaatataaggaaatattctttgatcagtcgaaaaacgggtacgcaggttatattgacggcggagcgagtcaagaggaattctacaagtttatcaaacccatattagagaagatggatgggacggaagagttgcttgtaaaactcaatcgcgaagatctactgcgaaagcagcggactttcgacaacggtagcattccacatcaaatccacttaggcgaattgcatgctatacttagaaggcaggaggatttttatccgttcctcaaagacaatcgtgaaaagattgagaaaatcctaacctttcgcataccttactatgtgggacccctggcccgagggaactctcggttcgcatggatgacaagaaagtccgaagaaacgattactccatggaattttgaggaagttgtcgataaaggtgcgtcagctcaatcgttcatcgagaggatgaccaactttgacaagaatttaccgaacgaaaaagtattgcctaagcacagtttactttacgagtatttcacagtgtacaatgaactcacgaaagttaagtatgtcactgagggcatgcgtaaacccgcctttctaagcggagaacagaagaaagcaatagtagatctgttattcaagaccaaccgcaaagtgacagttaagcaattgaaagaggactactttaagaaaattgaatgcttcgattctgtcgagatctccggggtagaagatcgatttaatgcgtcacttggtacgtatcatgacctcctaaagataattaaagataaggacttcctggataacgaagagaatgaagatatcttagaagatatagtgttgactcttaccctctttgaagatcgggaaatgattgaggaaagactaaaaacatacgctcacctgttcgacgataaggttatgaaacagttaaagaggcgtcgctatacgggctggggacgattgtcgcggaaacttatcaacgggataagagacaagcaaagtggtaaaactattctcgattttctaaagagcgacggcttcgccaataggaactttatgcagctgatccatgatgactctttaaccttcaaagaggatatacaaaaggcacaggtttccggacaaggggactcattgcacgaacatattgcgaatcttgctggttcgccagccatcaaaaagggcatactccagacagtcaaagtagtggatgagctagttaaggtcatgggacgtcacaaaccggaaaacattgtaatcgagatggcacgcgaaaatcaaacgactcagaaggggcaaaaaaacagtcgagagcggatgaagagaatagaagagggtattaaagaactgggcagccagatcttaaaggagcatcctgtggaaaatacccaattgcagaacgagaaactttacctctattacctacaaaatggaagggacatgtatgttgatcaggaactggacataaaccgtttatctgattacgacgtcgatgccattgtaccccaatcctttttgaaggacgattcaatcgacaataaagtgcttacacgctcggataagaaccgagggaaaagtgacaatgttccaagcgaggaagtcgtaaagaaaatgaagaactattggcggcagctcctaaatgcgaaactgataacgcaaagaaagttcgataacttaactaaagctgagaggggtggcttgtctgaacttgacaaggccggatttattaaacgtcagctcgtggaaacccgccaaatcacaaagcatgttgcacagatactagattcccgaatgaatacgaaatacgacgagaacgataagctgattcgggaagtcaaagtaatcactttaaagtcaaaattggtgtcggacttcagaaaggattttcaattctataaagttagggagataaataactaccaccatgcgcacgacgcttatcttaatgccgtcgtagggaccgcactcattaagaaatacccgaagctagaaagtgagtttgtgtatggtgattacaaagtttatgacgtccgtaagatgatcgcgaaaagcgaacaggagataggcaaggctacagccaaatacttcttttattctaacattatgaatttctttaagacggaaatcactctggcaaacggagagatacgcaaacgacctttaattgaaaccaatggggagacaggtgaaatcgtatgggataagggccgggacttcgcgacggtgagaaaagttttgtccatgccccaagtcaacatagtaaagaaaactgaggtgcagaccggagggttttcaaaggaatcgattcttccaaaaaggaatagtgataagctcatcgctcgtaaaaaggactgggacccgaaaaagtacggtggcttcgatagccctacagttgcctattctgtcctagtagtggcaaaagttgagaagggaaaatccaagaaactgaagtcagtcaaagaattattggggataacgattatggagcgctcgtcttttgaaaagaaccccatcgacttccttgaggcgaaaggttacaaggaagtaaaaaaggatctcataattaaactaccaaagtatagtctgtttgagttagaaaatggccgaaaacggatgttggctagcgccggagagcttcaaaaggggaacgaactcgcactaccgtctaaatacgtgaatttcctgtatttagcgtcccattacgagaagttgaaaggttcacctgaagataacgaacagaagcaactttttgttgagcagcacaaacattatctcgacgaaatcatagagcaaatttcggaattcagtaagagagtcatcctagctgatgccaatctggacaaagtattaagcgcatacaacaagcacagggataaacccatacgtgagcaggcggaaaatattatccatttgtttactcttaccaacctcggcgctccagccgcattcaagtattttgacacaacgatagatcgcaaacgatacacttctaccaaggaggtgctagacgcgacactgattcaccaatccatcacgggattatatgaaactcggatagatttgtcacagcttgggggtgacaactcaaagaaaaggtcactggaggacaacgaaacggaaatcaaagtctccagagacacctggaacactaagaacatgcggtccctggaaccgccacgaagcaagaaacggatacat

SEQ ID NO: 165 - DNA, 5157 bp, Artificial Sequence
  chemically synthesized
atgcccaaaaagaagaggaaagtcagctcttttttggacggtattgacaaagctcaggacgaacatgaaaagtaccactctaactggagagctatggcctccgattttaatcttccgccggtggtagcgaaagaaatcgttgccagttgcgacaaatgccaattgaagggagaagccatgcatggtcaagtggattgttcccccggaatatggcaactcgattgcacgcatctggaaggcaaggtcatcctcgtagcggtacatgttgcttctggatatattgaggccgaggttataccggcagaaacgggccaagaaacagcgtactttctcctgaagcttgcgggacgctggcctgtgaaaacgattcataccgacaacggttctaactttaccggagcaacagtacgggccgcatgctggtgggccggtataaagcaggaatttgggattccatacaatccgcaaagtcaaggtgtcgtcgagtctatgaataaggaactcaaaaagataattggtcaggttagagatcaagccgaacatctcaagacggcggtccaaatggcagtttttattcacaactttaagaggaaaggtgggattggtggctattcagcaggggagcgaatagtggacataatagcaaccgacatacagactaaggagttgcaaaagcagatcacaaagattcaaaattttcgggtttattaccgcgatagccggaatccgctttggaaaggtcctgcgaaacttttgtggaagggcgagggagctgtcgtcattcaggataacagcgacatcaaggtcgttccgcggcgcaaggcgaaaatcatacgggactatggtaaacaaatggccggggatgacagcgttgcgtcccggcaagacgaggatgggggcgggggaagcggcggtggaggtagtggagggggaggatcagataaaaagtattctattggtttagccatcggcactaattccgttggatgggctgtcataaccgatgaatacaaagtaccttcaaagaaatttaaggtgttggggaacacagaccgtcattcgattaaaaagaatcttatcggtgccctcctattcgatagtggcgaaacggcagaggcgactcgcctgaaacgaaccgctcggagaaggtatacacgtcgcaagaaccgaatatgttacttacaagaaatttttagcaatgagatggccaaagttgacgattctttctttcaccgtttggaagagtccttccttgtcgaagaggacaagaaacatgaacggcaccccatctttggaaacatagtagatgaggtggcatatcatgaaaagtacccaacgatttatcacctcagaaaaaagctagttgactcaactgataaagcggacctgaggttaatctacttggctcttgcccatatgataaagttccgtgggcactttctcattgagggtgatctaaatccggacaactcggatgtcgacaaactgttcatccagttagtacaaacctataatcagttgtttgaagagaaccctataaatgcaagtggcgtggatgcgaaggctattcttagcgcccgcctctctaaatcccgacggctagaaaacctgatcgcacaattacccggagagaagaaaaatgggttgttcggtaaccttatagcgctctcactaggcctgacaccaaattttaagtcgaacttcgacttagctgaagatgccaaattgcagcttagtaaggacacgtacgatgacgatctcgacaatctactggcacaaattggagatcagtatgcggacttatttttggctgccaaaaaccttagcgatgcaatcctcctatctgacatactgagagttaatactgagattaccaaggcgccgttatccgcttcaatgatcaaaaggtacgatgaacatcaccaagacttgacacttctcaaggccctagtccgtcagcaactgcctgagaaatataaggaaatattctttgatcagtcgaaaaacgggtacgcaggttatattgacggcggagcgagtcaagaggaattctacaagtttatcaaacccatattagagaagatggatgggacggaagagttgcttgtaaaactcaatcgcgaagatctactgcgaaagcagcggactttcgacaacggtagcattccacatcaaatccacttaggcgaattgcatgctatacttagaaggcaggaggatttttatccgttcctcaaagacaatcgtgaaaagattgagaaaatcctaacctttcgcataccttactatgtgggacccctggcccgagggaactctcggttcgcatggatgacaagaaagtccgaagaaacgattactccatggaattttgaggaagttgtcgataaaggtgcgtcagctcaatcgttcatcgagaggatgaccaactttgacaagaatttaccgaacgaaaaagtattgcctaagcacagtttactttacgagtatttcacagtgtacaatgaactcacgaaagttaagtatgtcactgagggcatgcgtaaacccgcctttctaagcggagaacagaagaaagcaatagtagatctgttattcaagaccaaccgcaaagtgacagttaagcaattgaaagaggactactttaagaaaattgaatgcttcgattctgtcgagatctccggggtagaagatcgatttaatgcgtcacttggtacgtatcatgacctcctaaagataattaaagataaggacttcctggataacgaagagaatgaagatatcttagaagatatagtgttgactcttaccctctttgaagatcgggaaatgattgaggaaagactaaaaacatacgctcacctgttcgacgataaggttatgaaacagttaaagaggcgtcgctatacgggctggggacgattgtcgcggaaacttatcaacgggataagagacaagcaaagtggtaaaactattctcgattttctaaagagcgacggcttcgccaataggaactttatgcagctgatccatgatgactctttaaccttcaaagaggatatacaaaaggcacaggtttccggacaaggggactcattgcacgaacatattgcgaatcttgctggttcgccagccatcaaaaagggcatactccagacagtcaaagtagtggatgagctagttaaggtcatgggacgtcacaaaccggaaaacattgtaatcgagatggcacgcgaaaatcaaacgactcagaaggggcaaaaaaacagtcgagagcggatgaagagaatagaagagggtattaaagaactgggcagccagatcttaaaggagcatcctgtggaaaatacccaattgcagaacgagaaactttacctctattacctacaaaatggaagggacatgtatgttgatcaggaactggacataaaccgtttatctgattacgacgtcgatgccattgtaccccaatcctttttgaaggacgattcaatcgacaataaagtgcttacacgctcggataagaaccgagggaaaagtgacaatgttccaagcgaggaagtcgtaaagaaaatgaagaactattggcggcagctcctaaatgcgaaactgataacgcaaagaaagttcgataacttaactaaagctgagaggggtggcttgtctgaacttgacaaggccggatttattaaacgtcagctcgtggaaacccgccaaatcacaaagcatgttgcacagatactagattcccgaatgaatacgaaatacgacgagaacgataagctgattcgggaagtcaaagtaatcactttaaagtcaaaattggtgtcggacttcagaaaggattttcaattctataaagttagggagataaataactaccaccatgcgcacgacgcttatcttaatgccgtcgtagggaccgcactcattaagaaatacccgaagctagaaagtgagtttgtgtatggtgattacaaagtttatgacgtccgtaagatgatcgcgaaaagcgaacaggagataggcaaggctacagccaaatacttcttttattctaacattatgaatttctttaagacggaaatcactctggcaaacggagagatacgcaaacgacctttaattgaaaccaatggggagacaggtgaaatcgtatgggataagggccgggacttcgcgacggtgagaaaagttttgtccatgccccaagtcaacatagtaaagaaaactgaggtgcagaccggagggttttcaaaggaatcgattcttccaaaaaggaatagtgataagctcatcgctcgtaaaaaggactgggacccgaaaaagtacggtggcttcgatagccctacagttgcctattctgtcctagtagtggcaaaagttgagaagggaaaatccaagaaactgaagtcagtcaaagaattattggggataacgattatggagcgctcgtcttttgaaaagaaccccatcgacttccttgaggcgaaaggttacaaggaagtaaaaaaggatctcataattaaactaccaaagtatagtctgtttgagttagaaaatggccgaaaacggatgttggctagcgccggagagcttcaaaaggggaacgaactcgcactaccgtctaaatacgtgaatttcctgtatttagcgtcccattacgagaagttgaaaggttcacctgaagataacgaacagaagcaactttttgttgagcagcacaaacattatctcgacgaaatcatagagcaaatttcggaattcagtaagagagtcatcctagctgatgccaatctggacaaagtattaagcgcatacaacaagcacagggataaacccatacgtgagcaggcggaaaatattatccatttgtttactcttaccaacctcggcgctccagccgcattcaagtattttgacacaacgatagatcgcaaacgatacacttctaccaaggaggtgctagacgcgacactgattcaccaatccatcacgggattatatgaaactcggatagatttgtcacagcttgggggtgacaactcaaagaaaaggtcactggaggacaacgaaacggaaatcaaagtctccagagacacctggaacactaagaacatgcggtccctggaaccgccacgaagcaagaaacggatacat

SEQ ID NO: 166 - DNA, 5157 bp, Artificial Sequence
  chemically synthesized
atgcccaaaaagaagaggaaagtcagctcttttttggacggtattgacaaagctcaggacgaacatgaaaagtaccactctaactggagagctatggcctccgattttaatcttccgccggtggtagcgaaagaaatcgttgccagttgcgacaaatgccaattgaagggagaagccatgcatggtcaagtggattgttcccccggaatatggcaactcgattgcacgcatctggaaggcaaggtcatcctcgtagcggtacatgttgcttctggatatattgaggccgaggttataccggcagaaacgggccaagaaacagcgtactttctcctgaagcttgcgggacgctggcctgtgaaaacgattcataccgacaacggttctaactttaccggagcaacagtacgggccgcatgctggtgggccggtataaagcaggaatttgggattccatacaatccgcaaagtcaaggtgtcgtcgagtctatgaataaggaactcaaaaagataattggtcaggttagagatcaagccgaacatctcaagacggcggtccaaatggcagtttttattcacaacaagaagaggaaaggtgggattggtggctattcagcaggggagcgaatagtggacataatagcaaccgacatacagactaaggagttgcaaaagcagatcacaaagattcaaaattttcgggtttattaccgcgatagccggaatccgctttggaaaggtcctgcgaaacttttgtggaagggcgagggagctgtcgtcattcaggataacagcgacatcaaggtcgttccgcggcgcaaggcgaaaatcatacgggactatggtaaacaaatggccggggatgactgcgttgcgtcccggcaagacgaggatgggggcgggggaagcggcggtggaggtagtggagggggaggatcagataaaaagtattctattggtttagccatcggcactaattccgttggatgggctgtcataaccgatgaatacaaagtaccttcaaagaaatttaaggtgttggggaacacagaccgtcattcgattaaaaagaatcttatcggtgccctcctattcgatagtggcgaaacggcagaggcgactcgcctgaaacgaaccgctcggagaaggtatacacgtcgcaagaaccgaatatgttacttacaagaaatttttagcaatgagatggccaaagttgacgattctttctttcaccgtttggaagagtccttccttgtcgaagaggacaagaaacatgaacggcaccccatctttggaaacatagtagatgaggtggcatatcatgaaaagtacccaacgatttatcacctcagaaaaaagctagttgactcaactgataaagcggacctgaggttaatctacttggctcttgcccatatgataaagttccgtgggcactttctcattgagggtgatctaaatccggacaactcggatgtcgacaaactgttcatccagttagtacaaacctataatcagttgtttgaagagaaccctataaatgcaagtggcgtggatgcgaaggctattcttagcgcccgcctctctaaatcccgacggctagaaaacctgatcgcacaattacccggagagaagaaaaatgggttgttcggtaaccttatagcgctctcactaggcctgacaccaaattttaagtcgaacttcgacttagctgaagatgccaaattgcagcttagtaaggacacgtacgatgacgatctcgacaatctactggcacaaattggagatcagtatgcggacttatttttggctgccaaaaaccttagcgatgcaatcctcctatctgacatactgagagttaatactgagattaccaaggcgccgttatccgcttcaatgatcaaaaggtacgatgaacatcaccaagacttgacacttctcaaggccctagtccgtcagcaactgcctgagaaatataaggaaatattctttgatcagtcgaaaaacgggtacgcaggttatattgacggcggagcgagtcaagaggaattctacaagtttatcaaacccatattagagaagatggatgggacggaagagttgcttgtaaaactcaatcgcgaagatctactgcgaaagcagcggactttcgacaacggtagcattccacatcaaatccacttaggcgaattgcatgctatacttagaaggcaggaggatttttatccgttcctcaaagacaatcgtgaaaagattgagaaaatcctaacctttcgcataccttactatgtgggacccctggcccgagggaactctcggttcgcatggatgacaagaaagtccgaagaaacgattactccatggaattttgaggaagttgtcgataaaggtgcgtcagctcaatcgttcatcgagaggatgaccaactttgacaagaatttaccgaacgaaaaagtattgcctaagcacagtttactttacgagtatttcacagtgtacaatgaactcacgaaagttaagtatgtcactgagggcatgcgtaaacccgcctttctaagcggagaacagaagaaagcaatagtagatctgttattcaagaccaaccgcaaagtgacagttaagcaattgaaagaggactactttaagaaaattgaatgcttcgattctgtcgagatctccggggtagaagatcgatttaatgcgtcacttggtacgtatcatgacctcctaaagataattaaagataaggacttcctggataacgaagagaatgaagatatcttagaagatatagtgttgactcttaccctctttgaagatcgggaaatgattgaggaaagactaaaaacatacgctcacctgttcgacgataaggttatgaaacagttaaagaggcgtcgctatacgggctggggacgattgtcgcggaaacttatcaacgggataagagacaagcaaagtggtaaaactattctcgattttctaaagagcgacggcttcgccaataggaactttatgcagctgatccatgatgactctttaaccttcaaagaggatatacaaaaggcacaggtttccggacaaggggactcattgcacgaacatattgcgaatcttgctggttcgccagccatcaaaaagggcatactccagacagtcaaagtagtggatgagctagttaaggtcatgggacgtcacaaaccggaaaacattgtaatcgagatggcacgcgaaaatcaaacgactcagaaggggcaaaaaaacagtcgagagcggatgaagagaatagaagagggtattaaagaactgggcagccagatcttaaaggagcatcctgtggaaaatacccaattgcagaacgagaaactttacctctattacctacaaaatggaagggacatgtatgttgatcaggaactggacataaaccgtttatctgattacgacgtcgatgccattgtaccccaatcctttttgaaggacgattcaatcgacaataaagtgcttacacgctcggataagaaccgagggaaaagtgacaatgttccaagcgaggaagtcgtaaagaaaatgaagaactattggcggcagctcctaaatgcgaaactgataacgcaaagaaagttcgataacttaactaaagctgagaggggtggcttgtctgaacttgacaaggccggatttattaaacgtcagctcgtggaaacccgccaaatcacaaagcatgttgcacagatactagattcccgaatgaatacgaaatacgacgagaacgataagctgattcgggaagtcaaagtaatcactttaaagtcaaaattggtgtcggacttcagaaaggattttcaattctataaagttagggagataaataactaccaccatgcgcacgacgcttatcttaatgccgtcgtagggaccgcactcattaagaaatacccgaagctagaaagtgagtttgtgtatggtgattacaaagtttatgacgtccgtaagatgatcgcgaaaagcgaacaggagataggcaaggctacagccaaatacttcttttattctaacattatgaatttctttaagacggaaatcactctggcaaacggagagatacgcaaacgacctttaattgaaaccaatggggagacaggtgaaatcgtatgggataagggccgggacttcgcgacggtgagaaaagttttgtccatgccccaagtcaacatagtaaagaaaactgaggtgcagaccggagggttttcaaaggaatcgattcttccaaaaaggaatagtgataagctcatcgctcgtaaaaaggactgggacccgaaaaagtacggtggcttcgatagccctacagttgcctattctgtcctagtagtggcaaaagttgagaagggaaaatccaagaaactgaagtcagtcaaagaattattggggataacgattatggagcgctcgtcttttgaaaagaaccccatcgacttccttgaggcgaaaggttacaaggaagtaaaaaaggatctcataattaaactaccaaagtatagtctgtttgagttagaaaatggccgaaaacggatgttggctagcgccggagagcttcaaaaggggaacgaactcgcactaccgtctaaatacgtgaatttcctgtatttagcgtcccattacgagaagttgaaaggttcacctgaagataacgaacagaagcaactttttgttgagcagcacaaacattatctcgacgaaatcatagagcaaatttcggaattcagtaagagagtcatcctagctgatgccaatctggacaaagtattaagcgcatacaacaagcacagggataaacccatacgtgagcaggcggaaaatattatccatttgtttactcttaccaacctcggcgctccagccgcattcaagtattttgacacaacgatagatcgcaaacgatacacttctaccaaggaggtgctagacgcgacactgattcaccaatccatcacgggattatatgaaactcggatagatttgtcacagcttgggggtgacaactcaaagaaaaggtcactggaggacaacgaaacggaaatcaaagtctccagagacacctggaacactaagaacatgcggtccctggaaccgccacgaagcaagaaacggatacat

SEQ ID NO: 167 - DNA, 4959 bp, Artificial Sequence
  chemically synthesized
atgcccaaaaagaagaggaaagtcagctcttttttggacggtattgacaaagctcaggacgaacatgaaaagtaccactctaactggagagctatggcctccgattttaatcttccgccggtggtagcgaaagaaatcgttgccagttgcgacaaatgccaattgaagggagaagccatgcatggtcaagtggattgttcccccggaatatggcaactcgattgcacgcatctggaaggcaaggtcatcctcgtagcggtacatgttgcttctggatatattgaggccgaggttataccggcagaaacgggccaagaaacagcgtactttctcctgaagcttgcgggacgctggcctgtgaaaacgattcataccgacaacggttctaactttaccggagcaacagtacgggccgcatgctggtgggccggtataaagcaggaatttgggattccatacaatccgcaaagtcaaggtgtcgtcgagtctatgaataaggaactcaaaaagataattggtcaggttagagatcaagccgaacatctcaagacggcggtccaaatggcagtttttattcacaacaagaagaggaaaggtgggattggtggctattcagcaggggagcgaatagtggacataatagcaaccgacatacagactaaggagttgcaaaagcagatcacaaagattcaaaatgggggcgggggaagcggcggtggaggtagtggagggggaggatcagataaaaagtattctattggtttagccatcggcactaattccgttggatgggctgtcataaccgatgaatacaaagtaccttcaaagaaatttaaggtgttggggaacacagaccgtcattcgattaaaaagaatcttatcggtgccctcctattcgatagtggcgaaacggcagaggcgactcgcctgaaacgaaccgctcggagaaggtatacacgtcgcaagaaccgaatatgttacttacaagaaatttttagcaatgagatggccaaagttgacgattctttctttcaccgtttggaagagtccttccttgtcgaagaggacaagaaacatgaacggcaccccatctttggaaacatagtagatgaggtggcatatcatgaaaagtacccaacgatttatcacctcagaaaaaagctagttgactcaactgataaagcggacctgaggttaatctacttggctcttgcccatatgataaagttccgtgggcactttctcattgagggtgatctaaatccggacaactcggatgtcgacaaactgttcatccagttagtacaaacctataatcagttgtttgaagagaaccctataaatgcaagtggcgtggatgcgaaggctattcttagcgcccgcctctctaaatcccgacggctagaaaacctgatcgcacaattacccggagagaagaaaaatgggttgttcggtaaccttatagcgctctcactaggcctgacaccaaattttaagtcgaacttcgacttagctgaagatgccaaattgcagcttagtaaggacacgtacgatgacgatctcgacaatctactggcacaaattggagatcagtatgcggacttatttttggctgccaaaaaccttagcgatgcaatcctcctatctgacatactgagagttaatactgagattaccaaggcgccgttatccgcttcaatgatcaaaaggtacgatgaacatcaccaagacttgacacttctcaaggccctagtccgtcagcaactgcctgagaaatataaggaaatattctttgatcagtcgaaaaacgggtacgcaggttatattgacggcggagcgagtcaagaggaattctacaagtttatcaaacccatattagagaagatggatgggacggaagagttgcttgtaaaactcaatcgcgaagatctactgcgaaagcagcggactttcgacaacggtagcattccacatcaaatccacttaggcgaattgcatgctatacttagaaggcaggaggatttttatccgttcctcaaagacaatcgtgaaaagattgagaaaatcctaacctttcgcataccttactatgtgggacccctggcccgagggaactctcggttcgcatggatgacaagaaagtccgaagaaacgattactccatggaattttgaggaagttgtcgataaaggtgcgtcagctcaatcgttcatcgagaggatgaccaactttgacaagaatttaccgaacgaaaaagtattgcctaagcacagtttactttacgagtatttcacagtgtacaatgaactcacgaaagttaagtatgtcactgagggcatgcgtaaacccgcctttctaagcggagaacagaagaaagcaatagtagatctgttattcaagaccaaccgcaaagtgacagttaagcaattgaaagaggactactttaagaaaattgaatgcttcgattctgtcgagatctccggggtagaagatcgatttaatgcgtcacttggtacgtatcatgacctcctaaagataattaaagataaggacttcctggataacgaagagaatgaagatatcttagaagatatagtgttgactcttaccctctttgaagatcgggaaatgattgaggaaagactaaaaacatacgctcacctgttcgacgataaggttatgaaacagttaaagaggcgtcgctatacgggctggggacgattgtcgcggaaacttatcaacgggataagagacaagcaaagtggtaaaactattctcgattttctaaagagcgacggcttcgccaataggaactttatgcagctgatccatgatgactctttaaccttcaaagaggatatacaaaaggcacaggtttccggacaaggggactcattgcacgaacatattgcgaatcttgctggttcgccagccatcaaaaagggcatactccagacagtcaaagtagtggatgagctagttaaggtcatgggacgtcacaaaccggaaaacattgtaatcgagatggcacgcgaaaatcaaacgactcagaaggggcaaaaaaacagtcgagagcggatgaagagaatagaagagggtattaaagaactgggcagccagatcttaaaggagcatcctgtggaaaatacccaattgcagaacgagaaactttacctctattacctacaaaatggaagggacatgtatgttgatcaggaactggacataaaccgtttatctgattacgacgtcgatgccattgtaccccaatcctttttgaaggacgattcaatcgacaataaagtgcttacacgctcggataagaaccgagggaaaagtgacaatgttccaagcgaggaagtcgtaaagaaaatgaagaactattggcggcagctcctaaatgcgaaactgataacgcaaagaaagttcgataacttaactaaagctgagaggggtggcttgtctgaacttgacaaggccggatttattaaacgtcagctcgtggaaacccgccaaatcacaaagcatgttgcacagatactagattcccgaatgaatacgaaatacgacgagaacgataagctgattcgggaagtcaaagtaatcactttaaagtcaaaattggtgtcggacttcagaaaggattttcaattctataaagttagggagataaataactaccaccatgcgcacgacgcttatcttaatgccgtcgtagggaccgcactcattaagaaatacccgaagctagaaagtgagtttgtgtatggtgattacaaagtttatgacgtccgtaagatgatcgcgaaaagcgaacaggagataggcaaggctacagccaaatacttcttttattctaacattatgaatttctttaagacggaaatcactctggcaaacggagagatacgcaaacgacctttaattgaaaccaatggggagacaggtgaaatcgtatgggataagggccgggacttcgcgacggtgagaaaagttttgtccatgccccaagtcaacatagtaaagaaaactgaggtgcagaccggagggttttcaaaggaatcgattcttccaaaaaggaatagtgataagctcatcgctcgtaaaaaggactgggacccgaaaaagtacggtggcttcgatagccctacagttgcctattctgtcctagtagtggcaaaagttgagaagggaaaatccaagaaactgaagtcagtcaaagaattattggggataacgattatggagcgctcgtcttttgaaaagaaccccatcgacttccttgaggcgaaaggttacaaggaagtaaaaaaggatctcataattaaactaccaaagtatagtctgtttgagttagaaaatggccgaaaacggatgttggctagcgccggagagcttcaaaaggggaacgaactcgcactaccgtctaaatacgtgaatttcctgtatttagcgtcccattacgagaagttgaaaggttcacctgaagataacgaacagaagcaactttttgttgagcagcacaaacattatctcgacgaaatcatagagcaaatttcggaattcagtaagagagtcatcctagctgatgccaatctggacaaagtattaagcgcatacaacaagcacagggataaacccatacgtgagcaggcggaaaatattatccatttgtttactcttaccaacctcggcgctccagccgcattcaagtattttgacacaacgatagatcgcaaacgatacacttctaccaaggaggtgctagacgcgacactgattcaccaatccatcacgggattatatgaaactcggatagatttgtcacagcttgggggtgacaactcaaagaaaaggtcactggaggacaacgaaacggaaatcaaagtctccagagacacctggaacactaagaacatgcggtccctggaaccgccacgaagcaagaaacggatacat

SEQ ID NO: 168 - DNA, 5157 bp, Artificial Sequence
  chemically synthesized
atgcccaaaaagaagaggaaagtcagctcttttttggacggtattgacaaagctcaggacgaacatgaaaagtaccactctaactggagagctatggcctccgattttaatcttccgccggtggtagcgaaagaaatcgttgccagttgcgacaaatgccaattgaagggagaagccatgcatggtcaagtggattgttcccccggaatatggcaactcgattgcacgcatctggaaggcaaggtcatcctcgtagcggtacatgttgcttctggatatattgaggccgaggttataccggcagaaacgggccaagaagcggcgtactttctcctgaagcttgcgggacgctggcctgtgaaaacgattcataccgacaacggttctaactttaccggagcaacagtacgggccgcatgctggtgggccggtataaagcaggaatttgggattccacggaatccgcaaagtcaaggtgtcgtcgagtctatgaataaggaactcaaaaagataattggtcaggttagagatcaagccgaacatctcaagacggcggtccaaatggcagtttttattcacaactttaagaggaaaggtgggattggtggctattcagcaggggagcgaatagtggacataatagcaaccgacatacagactaaggagttgcaaaagcagatcacaaagattcaaaattttcgggtttattaccgcgatagccggaatccgctttggaaaggtcctgcgaaacttttgtggaagggcgagggagctgtcgtcattcaggataacagcgacatcaaggtcgttccgcggcgcaaggcgaaaatcatacgggactatggtaaacaaatggccggggatgactgcgttgcgtcccggcaagacgaggatgggggcgggggaagcggcggtggaggtagtggagggggaggatcagataaaaagtattctattggtttagccatcggcactaattccgttggatgggctgtcataaccgatgaatacaaagtaccttcaaagaaatttaaggtgttggggaacacagaccgtcattcgattaaaaagaatcttatcggtgccctcctattcgatagtggcgaaacggcagaggcgactcgcctgaaacgaaccgctcggagaaggtatacacgtcgcaagaaccgaatatgttacttacaagaaatttttagcaatgagatggccaaagttgacgattctttctttcaccgtttggaagagtccttccttgtcgaagaggacaagaaacatgaacggcaccccatctttggaaacatagtagatgaggtggcatatcatgaaaagtacccaacgatttatcacctcagaaaaaagctagttgactcaactgataaagcggacctgaggttaatctacttggctcttgcccatatgataaagttccgtgggcactttctcattgagggtgatctaaatccggacaactcggatgtcgacaaactgttcatccagttagtacaaacctataatcagttgtttgaagagaaccctataaatgcaagtggcgtggatgcgaaggctattcttagcgcccgcctctctaaatcccgacggctagaaaacctgatcgcacaattacccggagagaagaaaaatgggttgttcggtaaccttatagcgctctcactaggcctgacaccaaattttaagtcgaacttcgacttagctgaagatgccaaattgcagcttagtaaggacacgtacgatgacgatctcgacaatctactggcacaaattggagatcagtatgcggacttatttttggctgccaaaaaccttagcgatgcaatcctcctatctgacatactgagagttaatactgagattaccaaggcgccgttatccgcttcaatgatcaaaaggtacgatgaacatcaccaagacttgacacttctcaaggccctagtccgtcagcaactgcctgagaaatataaggaaatattctttgatcagtcgaaaaacgggtacgcaggttatattgacggcggagcgagtcaagaggaattctacaagtttatcaaacccatattagagaagatggatgggacggaagagttgcttgtaaaactcaatcgcgaagatctactgcgaaagcagcggactttcgacaacggtagcattccacatcaaatccacttaggcgaattgcatgctatacttagaaggcaggaggatttttatccgttcctcaaagacaatcgtgaaaagattgagaaaatcctaacctttcgcataccttactatgtgggacccctggcccgagggaactctcggttcgcatggatgacaagaaagtccgaagaaacgattactccatggaattttgaggaagttgtcgataaaggtgcgtcagctcaatcgttcatcgagaggatgaccaactttgacaagaatttaccgaacgaaaaagtattgcctaagcacagtttactttacgagtatttcacagtgtacaatgaactcacgaaagttaagtatgtcactgagggcatgcgtaaacccgcctttctaagcggagaacagaagaaagcaatagtagatctgttattcaagaccaaccgcaaagtgacagttaagcaattgaaagaggactactttaagaaaattgaatgcttcgattctgtcgagatctccggggtagaagatcgatttaatgcgtcacttggtacgtatcatgacctcctaaagataattaaagataaggacttcctggataacgaagagaatgaagatatcttagaagatatagtgttgactcttaccctctttgaagatcgggaaatgattgaggaaagactaaaaacatacgctcacctgttcgacgataaggttatgaaacagttaaagaggcgtcgctatacgggctggggacgattgtcgcggaaacttatcaacgggataagagacaagcaaagtggtaaaactattctcgattttctaaagagcgacggcttcgccaataggaactttatgcagctgatccatgatgactctttaaccttcaaagaggatatacaaaaggcacaggtttccggacaaggggactcattgcacgaacatattgcgaatcttgctggttcgccagccatcaaaaagggcatactccagacagtcaaagtagtggatgagctagttaaggtcatgggacgtcacaaaccggaaaacattgtaatcgagatggcacgcgaaaatcaaacgactcagaaggggcaaaaaaacagtcgagagcggatgaagagaatagaagagggtattaaagaactgggcagccagatcttaaaggagcatcctgtggaaaatacccaattgcagaacgagaaactttacctctattacctacaaaatggaagggacatgtatgttgatcaggaactggacataaaccgtttatctgattacgacgtcgatgccattgtaccccaatcctttttgaaggacgattcaatcgacaataaagtgcttacacgctcggataagaaccgagggaaaagtgacaatgttccaagcgaggaagtcgtaaagaaaatgaagaactattggcggcagctcctaaatgcgaaactgataacgcaaagaaagttcgataacttaactaaagctgagaggggtggcttgtctgaacttgacaaggccggatttattaaacgtcagctcgtggaaacccgccaaatcacaaagcatgttgcacagatactagattcccgaatgaatacgaaatacgacgagaacgataagctgattcgggaagtcaaagtaatcactttaaagtcaaaattggtgtcggacttcagaaaggattttcaattctataaagttagggagataaataactaccaccatgcgcacgacgcttatcttaatgccgtcgtagggaccgcactcattaagaaatacccgaagctagaaagtgagtttgtgtatggtgattacaaagtttatgacgtccgtaagatgatcgcgaaaagcgaacaggagataggcaaggctacagccaaatacttcttttattctaacattatgaatttctttaagacggaaatcactctggcaaacggagagatacgcaaacgacctttaattgaaaccaatggggagacaggtgaaatcgtatgggataagggccgggacttcgcgacggtgagaaaagttttgtccatgccccaagtcaacatagtaaagaaaactgaggtgcagaccggagggttttcaaaggaatcgattcttccaaaaaggaatagtgataagctcatcgctcgtaaaaaggactgggacccgaaaaagtacggtggcttcgatagccctacagttgcctattctgtcctagtagtggcaaaagttgagaagggaaaatccaagaaactgaagtcagtcaaagaattattggggataacgattatggagcgctcgtcttttgaaaagaaccccatcgacttccttgaggcgaaaggttacaaggaagtaaaaaaggatctcataattaaactaccaaagtatagtctgtttgagttagaaaatggccgaaaacggatgttggctagcgccggagagcttcaaaaggggaacgaactcgcactaccgtctaaatacgtgaatttcctgtatttagcgtcccattacgagaagttgaaaggttcacctgaagataacgaacagaagcaactttttgttgagcagcacaaacattatctcgacgaaatcatagagcaaatttcggaattcagtaagagagtcatcctagctgatgccaatctggacaaagtattaagcgcatacaacaagcacagggataaacccatacgtgagcaggcggaaaatattatccatttgtttactcttaccaacctcggcgctccagccgcattcaagtattttgacacaacgatagatcgcaaacgatacacttctaccaaggaggtgctagacgcgacactgattcaccaatccatcacgggattatatgaaactcggatagatttgtcacagcttgggggtgacaactcaaagaaaaggtcactggaggacaacgaaacggaaatcaaagtctccagagacacctggaacactaagaacatgcggtccctggaaccgccacgaagcaagaaacggatacat

SEQ ID NO: 169 - DNA, 4959 bp, Artificial Sequence
  chemically synthesized
atgcccaaaaagaagaggaaagtcagctcttttttggacggtattgacaaagctcaggacgaacatgaaaagtaccactctaactggagagctatggcctccgattttaatcttccgccggtggtagcgaaagaaatcgttgccagttgcgacaaatgccaattgaagggagaagccatgcatggtcaagtggattgttcccccggaatatggcaactcgattgcacgcatctggaaggcaaggtcatcctcgtagcggtacatgttgcttctggatatattgaggccgaggttataccggcagaaacgggccaagaagcggcgtactttctcctgaagcttgcgggacgctggcctgtgaaaacgattcataccgacaacggttctaactttaccggagcaacagtacgggccgcatgctggtgggccggtataaagcaggaatttgggattccacggaatccgcaaagtcaaggtgtcgtcgagtctatgaataaggaactcaaaaagataattggtcaggttagagatcaagccgaacatctcaagacggcggtccaaatggcagtttttattcacaactttaagaggaaaggtgggattggtggctattcagcaggggagcgaatagtggacataatagcaaccgacatacagactaaggagttgcaaaagcagatcacaaagattcaaaatgggggcgggggaagcggcggtggaggtagtggagggggaggatcagataaaaagtattctattggtttagccatcggcactaattccgttggatgggctgtcataaccgatgaatacaaagtaccttcaaagaaatttaaggtgttggggaacacagaccgtcattcgattaaaaagaatcttatcggtgccctcctattcgatagtggcgaaacggcagaggcgactcgcctgaaacgaaccgctcggagaaggtatacacgtcgcaagaaccgaatatgttacttacaagaaatttttagcaatgagatggccaaagttgacgattctttctttcaccgtttggaagagtccttccttgtcgaagaggacaagaaacatgaacggcaccccatctttggaaacatagtagatgaggtggcatatcatgaaaagtacccaacgatttatcacctcagaaaaaagctagttgactcaactgataaagcggacctgaggttaatctacttggctcttgcccatatgataaagttccgtgggcactttctcattgagggtgatctaaatccggacaactcggatgtcgacaaactgttcatccagttagtacaaacctataatcagttgtttgaagagaaccctataaatgcaagtggcgtggatgcgaaggctattcttagcgcccgcctctctaaatcccgacggctagaaaacctgatcgcacaattacccggagagaagaaaaatgggttgttcggtaaccttatagcgctctcactaggcctgacaccaaattttaagtcgaacttcgacttagctgaagatgccaaattgcagcttagtaaggacacgtacgatgacgatctcgacaatctactggcacaaattggagatcagtatgcggacttatttttggctgccaaaaaccttagcgatgcaatcctcctatctgacatactgagagttaatactgagattaccaaggcgccgttatccgcttcaatgatcaaaaggtacgatgaacatcaccaagacttgacacttctcaaggccctagtccgtcagcaactgcctgagaaatataaggaaatattctttgatcagtcgaaaaacgggtacgcaggttatattgacggcggagcgagtcaagaggaattctacaagtttatcaaacccatattagagaagatggatgggacggaagagttgcttgtaaaactcaatcgcgaagatctactgcgaaagcagcggactttcgacaacggtagcattccacatcaaatccacttaggcgaattgcatgctatacttagaaggcaggaggatttttatccgttcctcaaagacaatcgtgaaaagattgagaaaatcctaacctttcgcataccttactatgtgggacccctggcccgagggaactctcggttcgcatggatgacaagaaagtccgaagaaacgattactccatggaattttgaggaagttgtcgataaaggtgcgtcagctcaatcgttcatcgagaggatgaccaactttgacaagaatttaccgaacgaaaaagtattgcctaagcacagtttactttacgagtatttcacagtgtacaatgaactcacgaaagttaagtatgtcactgagggcatgcgtaaacccgcctttctaagcggagaacagaagaaagcaatagtagatctgttattcaagaccaaccgcaaagtgacagttaagcaattgaaagaggactactttaagaaaattgaatgcttcgattctgtcgagatctccggggtagaagatcgatttaatgcgtcacttggtacgtatcatgacctcctaaagataattaaagataaggacttcctggataacgaagagaatgaagatatcttagaagatatagtgttgactcttaccctctttgaagatcgggaaatgattgaggaaagactaaaaacatacgctcacctgttcgacgataaggttatgaaacagttaaagaggcgtcgctatacgggctggggacgattgtcgcggaaacttatcaacgggataagagacaagcaaagtggtaaaactattctcgattttctaaagagcgacggcttcgccaataggaactttatgcagctgatccatgatgactctttaaccttcaaagaggatatacaaaaggcacaggtttccggacaaggggactcattgcacgaacatattgcgaatcttgctggttcgccagccatcaaaaagggcatactccagacagtcaaagtagtggatgagctagttaaggtcatgggacgtcacaaaccggaaaacattgtaatcgagatggcacgcgaaaatcaaacgactcagaaggggcaaaaaaacagtcgagagcggatgaagagaatagaagagggtattaaagaactgggcagccagatcttaaaggagcatcctgtggaaaatacccaattgcagaacgagaaactttacctctattacctacaaaatggaagggacatgtatgttgatcaggaactggacataaaccgtttatctgattacgacgtcgatgccattgtaccccaatcctttttgaaggacgattcaatcgacaataaagtgcttacacgctcggataagaaccgagggaaaagtgacaatgttccaagcgaggaagtcgtaaagaaaatgaagaactattggcggcagctcctaaatgcgaaactgataacgcaaagaaagttcgataacttaactaaagctgagaggggtggcttgtctgaacttgacaaggccggatttattaaacgtcagctcgtggaaacccgccaaatcacaaagcatgttgcacagatactagattcccgaatgaatacgaaatacgacgagaacgataagctgattcgggaagtcaaagtaatcactttaaagtcaaaattggtgtcggacttcagaaaggattttcaattctataaagttagggagataaataactaccaccatgcgcacgacgcttatcttaatgccgtcgtagggaccgcactcattaagaaatacccgaagctagaaagtgagtttgtgtatggtgattacaaagtttatgacgtccgtaagatgatcgcgaaaagcgaacaggagataggcaaggctacagccaaatacttcttttattctaacattatgaatttctttaagacggaaatcactctggcaaacggagagatacgcaaacgacctttaattgaaaccaatggggagacaggtgaaatcgtatgggataagggccgggacttcgcgacggtgagaaaagttttgtccatgccccaagtcaacatagtaaagaaaactgaggtgcagaccggagggttttcaaaggaatcgattcttccaaaaaggaatagtgataagctcatcgctcgtaaaaaggactgggacccgaaaaagtacggtggcttcgatagccctacagttgcctattctgtcctagtagtggcaaaagttgagaagggaaaatccaagaaactgaagtcagtcaaagaattattggggataacgattatggagcgctcgtcttttgaaaagaaccccatcgacttccttgaggcgaaaggttacaaggaagtaaaaaaggatctcataattaaactaccaaagtatagtctgtttgagttagaaaatggccgaaaacggatgttggctagcgccggagagcttcaaaaggggaacgaactcgcactaccgtctaaatacgtgaatttcctgtatttagcgtcccattacgagaagttgaaaggttcacctgaagataacgaacagaagcaactttttgttgagcagcacaaacattatctcgacgaaatcatagagcaaatttcggaattcagtaagagagtcatcctagctgatgccaatctggacaaagtattaagcgcatacaacaagcacagggataaacccatacgtgagcaggcggaaaatattatccatttgtttactcttaccaacctcggcgctccagccgcattcaagtattttgacacaacgatagatcgcaaacgatacacttctaccaaggaggtgctagacgcgacactgattcaccaatccatcacgggattatatgaaactcggatagatttgtcacagcttgggggtgacaactcaaagaaaaggtcactggaggacaacgaaacggaaatcaaagtctccagagacacctggaacactaagaacatgcggtccctggaaccgccacgaagcaagaaacggatacat

SEQ ID NO: 170 - DNA, 5157 bp, Artificial Sequence
  chemically synthesized
atgcccaaaaagaagaggaaagtcagctcttttttggacggtattgacaaagctcaggacgaacatgaaaagtaccactctaactggagagctatggcctccgattttaatcttccgccggtggtagcgaaagaaatcgttgccagttgcgacaaatgccaattgaagggagaagccatgcatggtcaagtggattgttcccccggaatatggcaactcgattgcacgcatctggaaggcaaggtcatcctcgtagcggtacatgttgcttctggatatattgaggccgaggttataccggcagaaacgggccaagaaacagcgtactttctcctgaagcttgcgggacgctggcctgtgaaaacgattcataccgacaacggttctaactttaccggagcaacagtacgggccgcatgctggtgggccggtataaagcaggaatttagcattccatacaatccgcaaagtcacggtgtcgtcgagtctatgaataaggaactcaaaaagataattggtcaggttagagatcaagccgaacatctcaagacggcggtccaaatggcagtttttattcacaactttaagaggaaaggtgggattggtggctattcagcaggggagcgaatagtggacataatagcaaccgacatacagactaaggagttgcaaaagcagatcacaaagattcaaaattttcgggtttattaccgcgatagccggaatccgctttggaaaggtcctgcgaaacttttgtggaagggcgagggagctgtcgtcattcaggataacagcgacatcaaggtcgttccgcggcgcaaggcgaaaatcatacgggactatggtaaacaaatggccggggatgactgcgttgcgtcccggcaagacgaggatgggggcgggggaagcggcggtggaggtagtggagggggaggatcagataaaaagtattctattggtttagccatcggcactaattccgttggatgggctgtcataaccgatgaatacaaagtaccttcaaagaaatttaaggtgttggggaacacagaccgtcattcgattaaaaagaatcttatcggtgccctcctattcgatagtggcgaaacggcagaggcgactcgcctgaaacgaaccgctcggagaaggtatacacgtcgcaagaaccgaatatgttacttacaagaaatttttagcaatgagatggccaaagttgacgattctttctttcaccgtttggaagagtccttccttgtcgaagaggacaagaaacatgaacggcaccccatctttggaaacatagtagatgaggtggcatatcatgaaaagtacccaacgatttatcacctcagaaaaaagctagttgactcaactgataaagcggacctgaggttaatctacttggctcttgcccatatgataaagttccgtgggcactttctcattgagggtgatctaaatccggacaactcggatgtcgacaaactgttcatccagttagtacaaacctataatcagttgtttgaagagaaccctataaatgcaagtggcgtggatgcgaaggctattcttagcgcccgcctctctaaatcccgacggctagaaaacctgatcgcacaattacccggagagaagaaaaatgggttgttcggtaaccttatagcgctctcactaggcctgacaccaaattttaagtcgaacttcgacttagctgaagatgccaaattgcagcttagtaaggacacgtacgatgacgatctcgacaatctactggcacaaattggagatcagtatgcggacttatttttggctgccaaaaaccttagcgatgcaatcctcctatctgacatactgagagttaatactgagattaccaaggcgccgttatccgcttcaatgatcaaaaggtacgatgaacatcaccaagacttgacacttctcaaggccctagtccgtcagcaactgcctgagaaatataaggaaatattctttgatcagtcgaaaaacgggtacgcaggttatattgacggcggagcgagtcaagaggaattctacaagtttatcaaacccatattagagaagatggatgggacggaagagttgcttgtaaaactcaatcgcgaagatctactgcgaaagcagcggactttcgacaacggtagcattccacatcaaatccacttaggcgaattgcatgctatacttagaaggcaggaggatttttatccgttcctcaaagacaatcgtgaaaagattgagaaaatcctaacctttcgcataccttactatgtgggacccctggcccgagggaactctcggttcgcatggatgacaagaaagtccgaagaaacgattactccatggaattttgaggaagttgtcgataaaggtgcgtcagctcaatcgttcatcgagaggatgaccaactttgacaagaatttaccgaacgaaaaagtattgcctaagcacagtttactttacgagtatttcacagtgtacaatgaactcacgaaagttaagtatgtcactgagggcatgcgtaaacccgcctttctaagcggagaacagaagaaagcaatagtagatctgttattcaagaccaaccgcaaagtgacagttaagcaattgaaagaggactactttaagaaaattgaatgcttcgattctgtcgagatctccggggtagaagatcgatttaatgcgtcacttggtacgtatcatgacctcctaaagataattaaagataaggacttcctggataacgaagagaatgaagatatcttagaagatatagtgttgactcttaccctctttgaagatcgggaaatgattgaggaaagactaaaaacatacgctcacctgttcgacgataaggttatgaaacagttaaagaggcgtcgctatacgggctggggacgattgtcgcggaaacttatcaacgggataagagacaagcaaagtggtaaaactattctcgattttctaaagagcgacggcttcgccaataggaactttatgcagctgatccatgatgactctttaaccttcaaagaggatatacaaaaggcacaggtttccggacaaggggactcattgcacgaacatattgcgaatcttgctggttcgccagccatcaaaaagggcatactccagacagtcaaagtagtggatgagctagttaaggtcatgggacgtcacaaaccggaaaacattgtaatcgagatggcacgcgaaaatcaaacgactcagaaggggcaaaaaaacagtcgagagcggatgaagagaatagaagagggtattaaagaactgggcagccagatcttaaaggagcatcctgtggaaaatacccaattgcagaacgagaaactttacctctattacctacaaaatggaagggacatgtatgttgatcaggaactggacataaaccgtttatctgattacgacgtcgatgccattgtaccccaatcctttttgaaggacgattcaatcgacaataaagtgcttacacgctcggataagaaccgagggaaaagtgacaatgttccaagcgaggaagtcgtaaagaaaatgaagaactattggcggcagctcctaaatgcgaaactgataacgcaaagaaagttcgataacttaactaaagctgagaggggtggcttgtctgaacttgacaaggccggatttattaaacgtcagctcgtggaaacccgccaaatcacaaagcatgttgcacagatactagattcccgaatgaatacgaaatacgacgagaacgataagctgattcgggaagtcaaagtaatcactttaaagtcaaaattggtgtcggacttcagaaaggattttcaattctataaagttagggagataaataactaccaccatgcgcacgacgcttatcttaatgccgtcgtagggaccgcactcattaagaaatacccgaagctagaaagtgagtttgtgtatggtgattacaaagtttatgacgtccgtaagatgatcgcgaaaagcgaacaggagataggcaaggctacagccaaatacttcttttattctaacattatgaatttctttaagacggaaatcactctggcaaacggagagatacgcaaacgacctttaattgaaaccaatggggagacaggtgaaatcgtatgggataagggccgggacttcgcgacggtgagaaaagttttgtccatgccccaagtcaacatagtaaagaaaactgaggtgcagaccggagggttttcaaaggaatcgattcttccaaaaaggaatagtgataagctcatcgctcgtaaaaaggactgggacccgaaaaagtacggtggcttcgatagccctacagttgcctattctgtcctagtagtggcaaaagttgagaagggaaaatccaagaaactgaagtcagtcaaagaattattggggataacgattatggagcgctcgtcttttgaaaagaaccccatcgacttccttgaggcgaaaggttacaaggaagtaaaaaaggatctcataattaaactaccaaagtatagtctgtttgagttagaaaatggccgaaaacggatgttggctagcgccggagagcttcaaaaggggaacgaactcgcactaccgtctaaatacgtgaatttcctgtatttagcgtcccattacgagaagttgaaaggttcacctgaagataacgaacagaagcaactttttgttgagcagcacaaacattatctcgacgaaatcatagagcaaatttcggaattcagtaagagagtcatcctagctgatgccaatctggacaaagtattaagcgcatacaacaagcacagggataaacccatacgtgagcaggcggaaaatattatccatttgtttactcttaccaacctcggcgctccagccgcattcaagtattttgacacaacgatagatcgcaaacgatacacttctaccaaggaggtgctagacgcgacactgattcaccaatccatcacgggattatatgaaactcggatagatttgtcacagcttgggggtgacaactcaaagaaaaggtcactggaggacaacgaaacggaaatcaaagtctccagagacacctggaacactaagaacatgcggtccctggaaccgccacgaagcaagaaacggatacat

SEQ ID NO: 171 - DNA, 4959 bp, Artificial Sequence
  chemically synthesized
atgcccaaaaagaagaggaaagtcagctcttttttggacggtattgacaaagctcaggacgaacatgaaaagtaccactctaactggagagctatggcctccgattttaatcttccgccggtggtagcgaaagaaatcgttgccagttgcgacaaatgccaattgaagggagaagccatgcatggtcaagtggattgttcccccggaatatggcaactcgattgcacgcatctggaaggcaaggtcatcctcgtagcggtacatgttgcttctggatatattgaggccgaggttataccggcagaaacgggccaagaaacagcgtactttctcctgaagcttgcgggacgctggcctgtgaaaacgattcataccgacaacggttctaactttaccggagcaacagtacgggccgcatgctggtgggccggtataaagcaggaatttagcattccatacaatccgcaaagtcacggtgtcgtcgagtctatgaataaggaactcaaaaagataattggtcaggttagagatcaagccgaacatctcaagacggcggtccaaatggcagtttttattcacaactttaagaggaaaggtgggattggtggctattcagcaggggagcgaatagtggacataatagcaaccgacatacagactaaggagttgcaaaagcagatcacaaagattcaaaatgggggcgggggaagcggcggtggaggtagtggagggggaggatcagataaaaagtattctattggtttagccatcggcactaattccgttggatgggctgtcataaccgatgaatacaaagtaccttcaaagaaatttaaggtgttggggaacacagaccgtcattcgattaaaaagaatcttatcggtgccctcctattcgatagtggcgaaacggcagaggcgactcgcctgaaacgaaccgctcggagaaggtatacacgtcgcaagaaccgaatatgttacttacaagaaatttttagcaatgagatggccaaagttgacgattctttctttcaccgtttggaagagtccttccttgtcgaagaggacaagaaacatgaacggcaccccatctttggaaacatagtagatgaggtggcatatcatgaaaagtacccaacgatttatcacctcagaaaaaagctagttgactcaactgataaagcggacctgaggttaatctacttggctcttgcccatatgataaagttccgtgggcactttctcattgagggtgatctaaatccggacaactcggatgtcgacaaactgttcatccagttagtacaaacctataatcagttgtttgaagagaaccctataaatgcaagtggcgtggatgcgaaggctattcttagcgcccgcctctctaaatcccgacggctagaaaacctgatcgcacaattacccggagagaagaaaaatgggttgttcggtaaccttatagcgctctcactaggcctgacaccaaattttaagtcgaacttcgacttagctgaagatgccaaattgcagcttagtaaggacacgtacgatgacgatctcgacaatctactggcacaaattggagatcagtatgcggacttatttttggctgccaaaaaccttagcgatgcaatcctcctatctgacatactgagagttaatactgagattaccaaggcgccgttatccgcttcaatgatcaaaaggtacgatgaacatcaccaagacttgacacttctcaaggccctagtccgtcagcaactgcctgagaaatataaggaaatattctttgatcagtcgaaaaacgggtacgcaggttatattgacggcggagcgagtcaagaggaattctacaagtttatcaaacccatattagagaagatggatgggacggaagagttgcttgtaaaactcaatcgcgaagatctactgcgaaagcagcggactttcgacaacggtagcattccacatcaaatccacttaggcgaattgcatgctatacttagaaggcaggaggatttttatccgttcctcaaagacaatcgtgaaaagattgagaaaatcctaacctttcgcataccttactatgtgggacccctggcccgagggaactctcggttcgcatggatgacaagaaagtccgaagaaacgattactccatggaattttgaggaagttgtcgataaaggtgcgtcagctcaatcgttcatcgagaggatgaccaactttgacaagaatttaccgaacgaaaaagtattgcctaagcacagtttactttacgagtatttcacagtgtacaatgaactcacgaaagttaagtatgtcactgagggcatgcgtaaacccgcctttctaagcggagaacagaagaaagcaatagtagatctgttattcaagaccaaccgcaaagtgacagttaagcaattgaaagaggactactttaagaaaattgaatgcttcgattctgtcgagatctccggggtagaagatcgatttaatgcgtcacttggtacgtatcatgacctcctaaagataattaaagataaggacttcctggataacgaagagaatgaagatatcttagaagatatagtgttgactcttaccctctttgaagatcgggaaatgattgaggaaagactaaaaacatacgctcacctgttcgacgataaggttatgaaacagttaaagaggcgtcgctatacgggctggggacgattgtcgcggaaacttatcaacgggataagagacaagcaaagtggtaaaactattctcgattttctaaagagcgacggcttcgccaataggaactttatgcagctgatccatgatgactctttaaccttcaaagaggatatacaaaaggcacaggtttccggacaaggggactcattgcacgaacatattgcgaatcttgctggttcgccagccatcaaaaagggcatactccagacagtcaaagtagtggatgagctagttaaggtcatgggacgtcacaaaccggaaaacattgtaatcgagatggcacgcgaaaatcaaacgactcagaaggggcaaaaaaacagtcgagagcggatgaagagaatagaagagggtattaaagaactgggcagccagatcttaaaggagcatcctgtggaaaatacccaattgcagaacgagaaactttacctctattacctacaaaatggaagggacatgtatgttgatcaggaactggacataaaccgtttatctgattacgacgtcgatgccattgtaccccaatcctttttgaaggacgattcaatcgacaataaagtgcttacacgctcggataagaaccgagggaaaagtgacaatgttccaagcgaggaagtcgtaaagaaaatgaagaactattggcggcagctcctaaatgcgaaactgataacgcaaagaaagttcgataacttaactaaagctgagaggggtggcttgtctgaacttgacaaggccggatttattaaacgtcagctcgtggaaacccgccaaatcacaaagcatgttgcacagatactagattcccgaatgaatacgaaatacgacgagaacgataagctgattcgggaagtcaaagtaatcactttaaagtcaaaattggtgtcggacttcagaaaggattttcaattctataaagttagggagataaataactaccaccatgcgcacgacgcttatcttaatgccgtcgtagggaccgcactcattaagaaatacccgaagctagaaagtgagtttgtgtatggtgattacaaagtttatgacgtccgtaagatgatcgcgaaaagcgaacaggagataggcaaggctacagccaaatacttcttttattctaacattatgaatttctttaagacggaaatcactctggcaaacggagagatacgcaaacgacctttaattgaaaccaatggggagacaggtgaaatcgtatgggataagggccgggacttcgcgacggtgagaaaagttttgtccatgccccaagtcaacatagtaaagaaaactgaggtgcagaccggagggttttcaaaggaatcgattcttccaaaaaggaatagtgataagctcatcgctcgtaaaaaggactgggacccgaaaaagtacggtggcttcgatagccctacagttgcctattctgtcctagtagtggcaaaagttgagaagggaaaatccaagaaactgaagtcagtcaaagaattattggggataacgattatggagcgctcgtcttttgaaaagaaccccatcgacttccttgaggcgaaaggttacaaggaagtaaaaaaggatctcataattaaactaccaaagtatagtctgtttgagttagaaaatggccgaaaacggatgttggctagcgccggagagcttcaaaaggggaacgaactcgcactaccgtctaaatacgtgaatttcctgtatttagcgtcccattacgagaagttgaaaggttcacctgaagataacgaacagaagcaactttttgttgagcagcacaaacattatctcgacgaaatcatagagcaaatttcggaattcagtaagagagtcatcctagctgatgccaatctggacaaagtattaagcgcatacaacaagcacagggataaacccatacgtgagcaggcggaaaatattatccatttgtttactcttaccaacctcggcgctccagccgcattcaagtattttgacacaacgatagatcgcaaacgatacacttctaccaaggaggtgctagacgcgacactgattcaccaatccatcacgggattatatgaaactcggatagatttgtcacagcttgggggtgacaactcaaagaaaaggtcactggaggacaacgaaacggaaatcaaagtctccagagacacctggaacactaagaacatgcggtccctggaaccgccacgaagcaagaaacggatacat

SEQ ID NO: 172 - DNA, 5262 bp, Artificial Sequence
  chemically synthesized
atgcccaaaaagaagaggaaagtcagctctccacttcgcgaggctaaggatttgcatactgcccttcatataggcccacgagctttgtcaaaagcctgtaatatcagcatgcagcaggcgagggaggtggtacagacctgtcctcactgcaatagtgccccagcccttgaggcaggggtcaatcccagagggcttgggccgcttcagatttggcaaacagatttcactcttgaaccgcgaatggcaccccggagttggcttgctgtaaccgtagatactgcgagtagcgctattgtggtcacacaacacggtagagtcacatccgtcgctgtgcaacatcattgggctaccgcaatagcggtattgggccgacctaaggcgattaagaccgacaacgggtcttgtttcactagcaagtctacacgggagtggctggctagatgggggattgcgcatacgaccgggattccgggcaacagtcagggtcaggccatggtagaaagggccaatcgccttctcaaggataggattcgggtactggccgagggtgatggctttatgaaacgcatcccaacatcaaagcagggggagcttctcgctaaggcgatgtatgcacttaatcattttgagagaggcgagaacactaagacgccaatacagaagcactggagacctacagtccttaccgaaggtccgcccgtcaaaattcggatcgaaacaggtgaatgggagaaaggatggaacgttcttgtttggggtcgaggctatgccgctgtgaagaatcgcgacactgataaggtgatatgggtcccgtcacgcaaagttaagcctgacatcacccaaaaagacgaggtcaccaaaaaggacgaagccagccccttgtttgctggaatttcagattggataccctgggaggatgagcaggaggggctccaaggagagactgcgtctaacaagcaggagagaccaggggaggatactctggcggccaatgaatctgggggcgggggaagcggcggtggaggtagtggagggggaggatcagataaaaagtattctattggtttagccatcggcactaattccgttggatgggctgtcataaccgatgaatacaaagtaccttcaaagaaatttaaggtgttggggaacacagaccgtcattcgattaaaaagaatcttatcggtgccctcctattcgatagtggcgaaacggcagaggcgactcgcctgaaacgaaccgctcggagaaggtatacacgtcgcaagaaccgaatatgttacttacaagaaatttttagcaatgagatggccaaagttgacgattctttctttcaccgtttggaagagtccttccttgtcgaagaggacaagaaacatgaacggcaccccatctttggaaacatagtagatgaggtggcatatcatgaaaagtacccaacgatttatcacctcagaaaaaagctagttgactcaactgataaagcggacctgaggttaatctacttggctcttgcccatatgataaagttccgtgggcactttctcattgagggtgatctaaatccggacaactcggatgtcgacaaactgttcatccagttagtacaaacctataatcagttgtttgaagagaaccctataaatgcaagtggcgtggatgcgaaggctattcttagcgcccgcctctctaaatcccgacggctagaaaacctgatcgcacaattacccggagagaagaaaaatgggttgttcggtaaccttatagcgctctcactaggcctgacaccaaattttaagtcgaacttcgacttagctgaagatgccaaattgcagcttagtaaggacacgtacgatgacgatctcgacaatctactggcacaaattggagatcagtatgcggacttatttttggctgccaaaaaccttagcgatgcaatcctcctatctgacatactgagagttaatactgagattaccaaggcgccgttatccgcttcaatgatcaaaaggtacgatgaacatcaccaagacttgacacttctcaaggccctagtccgtcagcaactgcctgagaaatataaggaaatattctttgatcagtcgaaaaacgggtacgcaggttatattgacggcggagcgagtcaagaggaattctacaagtttatcaaacccatattagagaagatggatgggacggaagagttgcttgtaaaactcaatcgcgaagatctactgcgaaagcagcggactttcgacaacggtagcattccacatcaaatccacttaggcgaattgcatgctatacttagaaggcaggaggatttttatccgttcctcaaagacaatcgtgaaaagattgagaaaatcctaacctttcgcataccttactatgtgggacccctggcccgagggaactctcggttcgcatggatgacaagaaagtccgaagaaacgattactccatggaattttgaggaagttgtcgataaaggtgcgtcagctcaatcgttcatcgagaggatgaccaactttgacaagaatttaccgaacgaaaaagtattgcctaagcacagtttactttacgagtatttcacagtgtacaatgaactcacgaaagttaagtatgtcactgagggcatgcgtaaacccgcctttctaagcggagaacagaagaaagcaatagtagatctgttattcaagaccaaccgcaaagtgacagttaagcaattgaaagaggactactttaagaaaattgaatgcttcgattctgtcgagatctccggggtagaagatcgatttaatgcgtcacttggtacgtatcatgacctcctaaagataattaaagataaggacttcctggataacgaagagaatgaagatatcttagaagatatagtgttgactcttaccctctttgaagatcgggaaatgattgaggaaagactaaaaacatacgctcacctgttcgacgataaggttatgaaacagttaaagaggcgtcgctatacgggctggggacgattgtcgcggaaacttatcaacgggataagagacaagcaaagtggtaaaactattctcgattttctaaagagcgacggcttcgccaataggaactttatgcagctgatccatgatgactctttaaccttcaaagaggatatacaaaaggcacaggtttccggacaaggggactcattgcacgaacatattgcgaatcttgctggttcgccagccatcaaaaagggcatactccagacagtcaaagtagtggatgagctagttaaggtcatgggacgtcacaaaccggaaaacattgtaatcgagatggcacgcgaaaatcaaacgactcagaaggggcaaaaaaacagtcgagagcggatgaagagaatagaagagggtattaaagaactgggcagccagatcttaaaggagcatcctgtggaaaatacccaattgcagaacgagaaactttacctctattacctacaaaatggaagggacatgtatgttgatcaggaactggacataaaccgtttatctgattacgacgtcgatgccattgtaccccaatcctttttgaaggacgattcaatcgacaataaagtgcttacacgctcggataagaaccgagggaaaagtgacaatgttccaagcgaggaagtcgtaaagaaaatgaagaactattggcggcagctcctaaatgcgaaactgataacgcaaagaaagttcgataacttaactaaagctgagaggggtggcttgtctgaacttgacaaggccggatttattaaacgtcagctcgtggaaacccgccaaatcacaaagcatgttgcacagatactagattcccgaatgaatacgaaatacgacgagaacgataagctgattcgggaagtcaaagtaatcactttaaagtcaaaattggtgtcggacttcagaaaggattttcaattctataaagttagggagataaataactaccaccatgcgcacgacgcttatcttaatgccgtcgtagggaccgcactcattaagaaatacccgaagctagaaagtgagtttgtgtatggtgattacaaagtttatgacgtccgtaagatgatcgcgaaaagcgaacaggagataggcaaggctacagccaaatacttcttttattctaacattatgaatttctttaagacggaaatcactctggcaaacggagagatacgcaaacgacctttaattgaaaccaatggggagacaggtgaaatcgtatgggataagggccgggacttcgcgacggtgagaaaagttttgtccatgccccaagtcaacatagtaaagaaaactgaggtgcagaccggagggttttcaaaggaatcgattcttccaaaaaggaatagtgataagctcatcgctcgtaaaaaggactgggacccgaaaaagtacggtggcttcgatagccctacagttgcctattctgtcctagtagtggcaaaagttgagaagggaaaatccaagaaactgaagtcagtcaaagaattattggggataacgattatggagcgctcgtcttttgaaaagaaccccatcgacttccttgaggcgaaaggttacaaggaagtaaaaaaggatctcataattaaactaccaaagtatagtctgtttgagttagaaaatggccgaaaacggatgttggctagcgccggagagcttcaaaaggggaacgaactcgcactaccgtctaaatacgtgaatttcctgtatttagcgtcccattacgagaagttgaaaggttcacctgaagataacgaacagaagcaactttttgttgagcagcacaaacattatctcgacgaaatcatagagcaaatttcggaattcagtaagagagtcatcctagctgatgccaatctggacaaagtattaagcgcatacaacaagcacagggataaacccatacgtgagcaggcggaaaatattatccatttgtttactcttaccaacctcggcgctccagccgcattcaagtattttgacacaacgatagatcgcaaacgatacacttctaccaaggaggtgctagacgcgacactgattcaccaatccatcacgggattatatgaaactcggatagatttgtcacagcttgggggtgacaactcaaagaaaaggtcactggaggacaacgaaacggaaatcaaagtctccagagacacctggaacactaagaacatgcggtccctggaaccgccacgaagcaagaaacggatacat

SEQ ID NO: 173 - DNA, 4956 bp, Artificial Sequence
  chemically synthesized
atgcccaaaaagaagaggaaagtcagctctccacttcgcgaggctaaggatttgcatactgcccttcatataggcccacgagctttgtcaaaagcctgtaatatcagcatgcagcaggcgagggaggtggtacagacctgtcctcactgcaatagtgccccagcccttgaggcaggggtcaatcccagagggcttgggccgcttcagatttggcaaacagatttcactcttgaaccgcgaatggcaccccggagttggcttgctgtaaccgtagatactgcgagtagcgctattgtggtcacacaacacggtagagtcacatccgtcgctgtgcaacatcattgggctaccgcaatagcggtattgggccgacctaaggcgattaagaccgacaacgggtcttgtttcactagcaagtctacacgggagtggctggctagatgggggattgcgcatacgaccgggattccgggcaacagtcagggtcaggccatggtagaaagggccaatcgccttctcaaggataggattcgggtactggccgagggtgatggctttatgaaacgcatcccaacatcaaagcagggggagcttctcgctaaggcgatgtatgcacttaatcattttgagagaggcgagaacactaagacgccaatacagaagcactggagacctacagtccttaccgaaggtgggggcgggggaagcggcggtggaggtagtggagggggaggatcagataaaaagtattctattggtttagccatcggcactaattccgttggatgggctgtcataaccgatgaatacaaagtaccttcaaagaaatttaaggtgttggggaacacagaccgtcattcgattaaaaagaatcttatcggtgccctcctattcgatagtggcgaaacggcagaggcgactcgcctgaaacgaaccgctcggagaaggtatacacgtcgcaagaaccgaatatgttacttacaagaaatttttagcaatgagatggccaaagttgacgattctttctttcaccgtttggaagagtccttccttgtcgaagaggacaagaaacatgaacggcaccccatctttggaaacatagtagatgaggtggcatatcatgaaaagtacccaacgatttatcacctcagaaaaaagctagttgactcaactgataaagcggacctgaggttaatctacttggctcttgcccatatgataaagttccgtgggcactttctcattgagggtgatctaaatccggacaactcggatgtcgacaaactgttcatccagttagtacaaacctataatcagttgtttgaagagaaccctataaatgcaagtggcgtggatgcgaaggctattcttagcgcccgcctctctaaatcccgacggctagaaaacctgatcgcacaattacccggagagaagaaaaatgggttgttcggtaaccttatagcgctctcactaggcctgacaccaaattttaagtcgaacttcgacttagctgaagatgccaaattgcagcttagtaaggacacgtacgatgacgatctcgacaatctactggcacaaattggagatcagtatgcggacttatttttggctgccaaaaaccttagcgatgcaatcctcctatctgacatactgagagttaatactgagattaccaaggcgccgttatccgcttcaatgatcaaaaggtacgatgaacatcaccaagacttgacacttctcaaggccctagtccgtcagcaactgcctgagaaatataaggaaatattctttgatcagtcgaaaaacgggtacgcaggttatattgacggcggagcgagtcaagaggaattctacaagtttatcaaacccatattagagaagatggatgggacggaagagttgcttgtaaaactcaatcgcgaagatctactgcgaaagcagcggactttcgacaacggtagcattccacatcaaatccacttaggcgaattgcatgctatacttagaaggcaggaggatttttatccgttcctcaaagacaatcgtgaaaagattgagaaaatcctaacctttcgcataccttactatgtgggacccctggcccgagggaactctcggttcgcatggatgacaagaaagtccgaagaaacgattactccatggaattttgaggaagttgtcgataaaggtgcgtcagctcaatcgttcatcgagaggatgaccaactttgacaagaatttaccgaacgaaaaagtattgcctaagcacagtttactttacgagtatttcacagtgtacaatgaactcacgaaagttaagtatgtcactgagggcatgcgtaaacccgcctttctaagcggagaacagaagaaagcaatagtagatctgttattcaagaccaaccgcaaagtgacagttaagcaattgaaagaggactactttaagaaaattgaatgcttcgattctgtcgagatctccggggtagaagatcgatttaatgcgtcacttggtacgtatcatgacctcctaaagataattaaagataaggacttcctggataacgaagagaatgaagatatcttagaagatatagtgttgactcttaccctctttgaagatcgggaaatgattgaggaaagactaaaaacatacgctcacctgttcgacgataaggttatgaaacagttaaagaggcgtcgctatacgggctggggacgattgtcgcggaaacttatcaacgggataagagacaagcaaagtggtaaaactattctcgattttctaaagagcgacggcttcgccaataggaactttatgcagctgatccatgatgactctttaaccttcaaagaggatatacaaaaggcacaggtttccggacaaggggactcattgcacgaacatattgcgaatcttgctggttcgccagccatcaaaaagggcatactccagacagtcaaagtagtggatgagctagttaaggtcatgggacgtcacaaaccggaaaacattgtaatcgagatggcacgcgaaaatcaaacgactcagaaggggcaaaaaaacagtcgagagcggatgaagagaatagaagagggtattaaagaactgggcagccagatcttaaaggagcatcctgtggaaaatacccaattgcagaacgagaaactttacctctattacctacaaaatggaagggacatgtatgttgatcaggaactggacataaaccgtttatctgattacgacgtcgatgccattgtaccccaatcctttttgaaggacgattcaatcgacaataaagtgcttacacgctcggataagaaccgagggaaaagtgacaatgttccaagcgaggaagtcgtaaagaaaatgaagaactattggcggcagctcctaaatgcgaaactgataacgcaaagaaagttcgataacttaactaaagctgagaggggtggcttgtctgaacttgacaaggccggatttattaaacgtcagctcgtggaaacccgccaaatcacaaagcatgttgcacagatactagattcccgaatgaatacgaaatacgacgagaacgataagctgattcgggaagtcaaagtaatcactttaaagtcaaaattggtgtcggacttcagaaaggattttcaattctataaagttagggagataaataactaccaccatgcgcacgacgcttatcttaatgccgtcgtagggaccgcactcattaagaaatacccgaagctagaaagtgagtttgtgtatggtgattacaaagtttatgacgtccgtaagatgatcgcgaaaagcgaacaggagataggcaaggctacagccaaatacttcttttattctaacattatgaatttctttaagacggaaatcactctggcaaacggagagatacgcaaacgacctttaattgaaaccaatggggagacaggtgaaatcgtatgggataagggccgggacttcgcgacggtgagaaaagttttgtccatgccccaagtcaacatagtaaagaaaactgaggtgcagaccggagggttttcaaaggaatcgattcttccaaaaaggaatagtgataagctcatcgctcgtaaaaaggactgggacccgaaaaagtacggtggcttcgatagccctacagttgcctattctgtcctagtagtggcaaaagttgagaagggaaaatccaagaaactgaagtcagtcaaagaattattggggataacgattatggagcgctcgtcttttgaaaagaaccccatcgacttccttgaggcgaaaggttacaaggaagtaaaaaaggatctcataattaaactaccaaagtatagtctgtttgagttagaaaatggccgaaaacggatgttggctagcgccggagagcttcaaaaggggaacgaactcgcactaccgtctaaatacgtgaatttcctgtatttagcgtcccattacgagaagttgaaaggttcacctgaagataacgaacagaagcaactttttgttgagcagcacaaacattatctcgacgaaatcatagagcaaatttcggaattcagtaagagagtcatcctagctgatgccaatctggacaaagtattaagcgcatacaacaagcacagggataaacccatacgtgagcaggcggaaaatattatccatttgtttactcttaccaacctcggcgctccagccgcattcaagtattttgacacaacgatagatcgcaaacgatacacttctaccaaggaggtgctagacgcgacactgattcaccaatccatcacgggattatatgaaactcggatagatttgtcacagcttgggggtgacaactcaaagaaaaggtcactggaggacaacgaaacggaaatcaaagtctccagagacacctggaacactaagaacatgcggtccctggaaccgccacgaagcaagaaacggatacat

SEQ ID NO: 174 - DNA, 5469 bp, Artificial Sequence
  chemically synthesized
atgcccaaaaagaagaggaaagtcagctcttgcaataccaaaaaacccaatctggatgcggagttggaccagttgctgcaaggtcactatatcaaggggtatcccaagcaatatacctattttctcgaagatgggaaggtaaaagtctctcggcccgagggcgtaaagattattccaccccaatcagaccgccaaaagatagttcttcaggcacataaccttgcccatacggggcgcgaggctacgctccttaagatcgcgaatctttattggtggcccaatatgcgaaaagacgtagtcaagcagcttggacgatgtcaacagtgtcttattacgaatgctagtaataaggcatctgggcctattcttagacccgaccggcctcaaaagccgtttgataagttcttcatcgactatattggaccattgccgcccagccagggttatctttatgtgttggtggtggtagacggtatgactggattcacatggctgtatcccacaaaggcgccgagcacgtccgctactgtaaaaagtctgaatgttctcacctccatagccatacctaaggttatccattccgaccaaggcgcggcgttcaccagtagtacctttgcggagtgggcaaaggagcggggtatccatttggagttctctacaccataccacccacagtcaggctcaaaggttgaacgaaagaatagcgatattaagaggctcctcacgaagctgctcgtgggacgaccaacaaaatggtacgatttgcttccggtcgtacagttggcactgaacaatacctacagcccggttctgaaatatacgccgcatcagcttctgttcggaatcgacagtaatacaccttttgccaaccaggacacactggatcttactagagaggaggaactgagtcttctgcaggagattcgcacttcactttaccatccgtctactccccctgcttcatcaagatcatggagtcccgttgtgggccagcttgttcaggaaagagtggcccgcccagccagtcttcggcctagatggcataagcccagcacagtacttaaggtactgaaccctaggacggttgtcatactcgatcacctgggcaataaccggactgtaagcatagataatctcaaaccaacatcccaccaaaatggcacgactaatgataccgcaacaatggatcatctggagaaaaatgaggggggcgggggaagcggcggtggaggtagtggagggggaggatcagataaaaagtattctattggtttagccatcggcactaattccgttggatgggctgtcataaccgatgaatacaaagtaccttcaaagaaatttaaggtgttggggaacacagaccgtcattcgattaaaaagaatcttatcggtgccctcctattcgatagtggcgaaacggcagaggcgactcgcctgaaacgaaccgctcggagaaggtatacacgtcgcaagaaccgaatatgttacttacaagaaatttttagcaatgagatggccaaagttgacgattctttctttcaccgtttggaagagtccttccttgtcgaagaggacaagaaacatgaacggcaccccatctttggaaacatagtagatgaggtggcatatcatgaaaagtacccaacgatttatcacctcagaaaaaagctagttgactcaactgataaagcggacctgaggttaatctacttggctcttgcccatatgataaagttccgtgggcactttctcattgagggtgatctaaatccggacaactcggatgtcgacaaactgttcatccagttagtacaaacctataatcagttgtttgaagagaaccctataaatgcaagtggcgtggatgcgaaggctattcttagcgcccgcctctctaaatcccgacggctagaaaacctgatcgcacaattacccggagagaagaaaaatgggttgttcggtaaccttatagcgctctcactaggcctgacaccaaattttaagtcgaacttcgacttagctgaagatgccaaattgcagcttagtaaggacacgtacgatgacgatctcgacaatctactggcacaaattggagatcagtatgcggacttatttttggctgccaaaaaccttagcgatgcaatcctcctatctgacatactgagagttaatactgagattaccaaggcgccgttatccgcttcaatgatcaaaaggtacgatgaacatcaccaagacttgacacttctcaaggccctagtccgtcagcaactgcctgagaaatataaggaaatattctttgatcagtcgaaaaacgggtacgcaggttatattgacggcggagcgagtcaagaggaattctacaagtttatcaaacccatattagagaagatggatgggacggaagagttgcttgtaaaactcaatcgcgaagatctactgcgaaagcagcggactttcgacaacggtagcattccacatcaaatccacttaggcgaattgcatgctatacttagaaggcaggaggatttttatccgttcctcaaagacaatcgtgaaaagattgagaaaatcctaacctttcgcataccttactatgtgggacccctggcccgagggaactctcggttcgcatggatgacaagaaagtccgaagaaacgattactccatggaattttgaggaagttgtcgataaaggtgcgtcagctcaatcgttcatcgagaggatgaccaactttgacaagaatttaccgaacgaaaaagtattgcctaagcacagtttactttacgagtatttcacagtgtacaatgaactcacgaaagttaagtatgtcactgagggcatgcgtaaacccgcctttctaagcggagaacagaagaaagcaatagtagatctgttattcaagaccaaccgcaaagtgacagttaagcaattgaaagaggactactttaagaaaattgaatgcttcgattctgtcgagatctccggggtagaagatcgatttaatgcgtcacttggtacgtatcatgacctcctaaagataattaaagataaggacttcctggataacgaagagaatgaagatatcttagaagatatagtgttgactcttaccctctttgaagatcgggaaatgattgaggaaagactaaaaacatacgctcacctgttcgacgataaggttatgaaacagttaaagaggcgtcgctatacgggctggggacgattgtcgcggaaacttatcaacgggataagagacaagcaaagtggtaaaactattctcgattttctaaagagcgacggcttcgccaataggaactttatgcagctgatccatgatgactctttaaccttcaaagaggatatacaaaaggcacaggtttccggacaaggggactcattgcacgaacatattgcgaatcttgctggttcgccagccatcaaaaagggcatactccagacagtcaaagtagtggatgagctagttaaggtcatgggacgtcacaaaccggaaaacattgtaatcgagatggcacgcgaaaatcaaacgactcagaaggggcaaaaaaacagtcgagagcggatgaagagaatagaagagggtattaaagaactgggcagccagatcttaaaggagcatcctgtggaaaatacccaattgcagaacgagaaactttacctctattacctacaaaatggaagggacatgtatgttgatcaggaactggacataaaccgtttatctgattacgacgtcgatgccattgtaccccaatcctttttgaaggacgattcaatcgacaataaagtgcttacacgctcggataagaaccgagggaaaagtgacaatgttccaagcgaggaagtcgtaaagaaaatgaagaactattggcggcagctcctaaatgcgaaactgataacgcaaagaaagttcgataacttaactaaagctgagaggggtggcttgtctgaacttgacaaggccggatttattaaacgtcagctcgtggaaacccgccaaatcacaaagcatgttgcacagatactagattcccgaatgaatacgaaatacgacgagaacgataagctgattcgggaagtcaaagtaatcactttaaagtcaaaattggtgtcggacttcagaaaggattttcaattctataaagttagggagataaataactaccaccatgcgcacgacgcttatcttaatgccgtcgtagggaccgcactcattaagaaatacccgaagctagaaagtgagtttgtgtatggtgattacaaagtttatgacgtccgtaagatgatcgcgaaaagcgaacaggagataggcaaggctacagccaaatacttcttttattctaacattatgaatttctttaagacggaaatcactctggcaaacggagagatacgcaaacgacctttaattgaaaccaatggggagacaggtgaaatcgtatgggataagggccgggacttcgcgacggtgagaaaagttttgtccatgccccaagtcaacatagtaaagaaaactgaggtgcagaccggagggttttcaaaggaatcgattcttccaaaaaggaatagtgataagctcatcgctcgtaaaaaggactgggacccgaaaaagtacggtggcttcgatagccctacagttgcctattctgtcctagtagtggcaaaagttgagaagggaaaatccaagaaactgaagtcagtcaaagaattattggggataacgattatggagcgctcgtcttttgaaaagaaccccatcgacttccttgaggcgaaaggttacaaggaagtaaaaaaggatctcataattaaactaccaaagtatagtctgtttgagttagaaaatggccgaaaacggatgttggctagcgccggagagcttcaaaaggggaacgaactcgcactaccgtctaaatacgtgaatttcctgtatttagcgtcccattacgagaagttgaaaggttcacctgaagataacgaacagaagcaactttttgttgagcagcacaaacattatctcgacgaaatcatagagcaaatttcggaattcagtaagagagtcatcctagctgatgccaatctggacaaagtattaagcgcatacaacaagcacagggataaacccatacgtgagcaggcggaaaatattatccatttgtttactcttaccaacctcggcgctccagccgcattcaagtattttgacacaacgatagatcgcaaacgatacacttctaccaaggaggtgctagacgcgacactgattcaccaatccatcacgggattatatgaaactcggatagatttgtcacagcttgggggtgacaactcaaagaaaaggtcactggaggacaacgaaacggaaatcaaagtctccagagacacctggaacactaagaacatgcggtccctggaaccgccacgaagcaagaaacggatacat

SEQ ID NO: 175 - DNA, 5241 bp, Artificial Sequence
  chemically synthesized
atgcccaaaaagaagaggaaagtcagctcttgcaataccaaaaaacccaatctggatgcggagttggaccagttgctgcaaggtcactatatcaaggggtatcccaagcaatatacctattttctcgaagatgggaaggtaaaagtctctcggcccgagggcgtaaagattattccaccccaatcagaccgccaaaagatagttcttcaggcacataaccttgcccatacggggcgcgaggctacgctccttaagatcgcgaatctttattggtggcccaatatgcgaaaagacgtagtcaagcagcttggacgatgtcaacagtgtcttattacgaatgctagtaataaggcatctgggcctattcttagacccgaccggcctcaaaagccgtttgataagttcttcatcgactatattggaccattgccgcccagccagggttatctttatgtgttggtggtggtagacggtatgactggattcacatggctgtatcccacaaaggcgccgagcacgtccgctactgtaaaaagtctgaatgttctcacctccatagccatacctaaggttatccattccgaccaaggcgcggcgttcaccagtagtacctttgcggagtgggcaaaggagcggggtatccatttggagttctctacaccataccacccacagtcaggctcaaaggttgaacgaaagaatagcgatattaagaggctcctcacgaagctgctcgtgggacgaccaacaaaatggtacgatttgcttccggtcgtacagttggcactgaacaatacctacagcccggttctgaaatatacgccgcatcagcttctgttcggaatcgacagtaatacaccttttgccaaccaggacacactggatcttactagagaggaggaactgagtcttctgcaggagattcgcacttcactttaccatccgtctactccccctgcttcatcaagatcatggagtgggggcgggggaagcggcggtggaggtagtggagggggaggatcagataaaaagtattctattggtttagccatcggcactaattccgttggatgggctgtcataaccgatgaatacaaagtaccttcaaagaaatttaaggtgttggggaacacagaccgtcattcgattaaaaagaatcttatcggtgccctcctattcgatagtggcgaaacggcagaggcgactcgcctgaaacgaaccgctcggagaaggtatacacgtcgcaagaaccgaatatgttacttacaagaaatttttagcaatgagatggccaaagttgacgattctttctttcaccgtttggaagagtccttccttgtcgaagaggacaagaaacatgaacggcaccccatctttggaaacatagtagatgaggtggcatatcatgaaaagtacccaacgatttatcacctcagaaaaaagctagttgactcaactgataaagcggacctgaggttaatctacttggctcttgcccatatgataaagttccgtgggcactttctcattgagggtgatctaaatccggacaactcggatgtcgacaaactgttcatccagttagtacaaacctataatcagttgtttgaagagaaccctataaatgcaagtggcgtggatgcgaaggctattcttagcgcccgcctctctaaatcccgacggctagaaaacctgatcgcacaattacccggagagaagaaaaatgggttgttcggtaaccttatagcgctctcactaggcctgacaccaaattttaagtcgaacttcgacttagctgaagatgccaaattgcagcttagtaaggacacgtacgatgacgatctcgacaatctactggcacaaattggagatcagtatgcggacttatttttggctgccaaaaaccttagcgatgcaatcctcctatctgacatactgagagttaatactgagattaccaaggcgccgttatccgcttcaatgatcaaaaggtacgatgaacatcaccaagacttgacacttctcaaggccctagtccgtcagcaactgcctgagaaatataaggaaatattctttgatcagtcgaaaaacgggtacgcaggttatattgacggcggagcgagtcaagaggaattctacaagtttatcaaacccatattagagaagatggatgggacggaagagttgcttgtaaaactcaatcgcgaagatctactgcgaaagcagcggactttcgacaacggtagcattccacatcaaatccacttaggcgaattgcatgctatacttagaaggcaggaggatttttatccgttcctcaaagacaatcgtgaaaagattgagaaaatcctaacctttcgcataccttactatgtgggacccctggcccgagggaactctcggttcgcatggatgacaagaaagtccgaagaaacgattactccatggaattttgaggaagttgtcgataaaggtgcgtcagctcaatcgttcatcgagaggatgaccaactttgacaagaatttaccgaacgaaaaagtattgcctaagcacagtttactttacgagtatttcacagtgtacaatgaactcacgaaagttaagtatgtcactgagggcatgcgtaaacccgcctttctaagcggagaacagaagaaagcaatagtagatctgttattcaagaccaaccgcaaagtgacagttaagcaattgaaagaggactactttaagaaaattgaatgcttcgattctgtcgagatctccggggtagaagatcgatttaatgcgtcacttggtacgtatcatgacctcctaaagataattaaagataaggacttcctggataacgaagagaatgaagatatcttagaagatatagtgttgactcttaccctctttgaagatcgggaaatgattgaggaaagactaaaaacatacgctcacctgttcgacgataaggttatgaaacagttaaagaggcgtcgctatacgggctggggacgattgtcgcggaaacttatcaacgggataagagacaagcaaagtggtaaaactattctcgattttctaaagagcgacggcttcgccaataggaactttatgcagctgatccatgatgactctttaaccttcaaagaggatatacaaaaggcacaggtttccggacaaggggactcattgcacgaacatattgcgaatcttgctggttcgccagccatcaaaaagggcatactccagacagtcaaagtagtggatgagctagttaaggtcatgggacgtcacaaaccggaaaacattgtaatcgagatggcacgcgaaaatcaaacgactcagaaggggcaaaaaaacagtcgagagcggatgaagagaatagaagagggtattaaagaactgggcagccagatcttaaaggagcatcctgtggaaaatacccaattgcagaacgagaaactttacctctattacctacaaaatggaagggacatgtatgttgatcaggaactggacataaaccgtttatctgattacgacgtcgatgccattgtaccccaatcctttttgaaggacgattcaatcgacaataaagtgcttacacgctcggataagaaccgagggaaaagtgacaatgttccaagcgaggaagtcgtaaagaaaatgaagaactattggcggcagctcctaaatgcgaaactgataacgcaaagaaagttcgataacttaactaaagctgagaggggtggcttgtctgaacttgacaaggccggatttattaaacgtcagctcgtggaaacccgccaaatcacaaagcatgttgcacagatactagattcccgaatgaatacgaaatacgacgagaacgataagctgattcgggaagtcaaagtaatcactttaaagtcaaaattggtgtcggacttcagaaaggattttcaattctataaagttagggagataaataactaccaccatgcgcacgacgcttatcttaatgccgtcgtagggaccgcactcattaagaaatacccgaagctagaaagtgagtttgtgtatggtgattacaaagtttatgacgtccgtaagatgatcgcgaaaagcgaacaggagataggcaaggctacagccaaatacttcttttattctaacattatgaatttctttaagacggaaatcactctggcaaacggagagatacgcaaacgacctttaattgaaaccaatggggagacaggtgaaatcgtatgggataagggccgggacttcgcgacggtgagaaaagttttgtccatgccccaagtcaacatagtaaagaaaactgaggtgcagaccggagggttttcaaaggaatcgattcttccaaaaaggaatagtgataagctcatcgctcgtaaaaaggactgggacccgaaaaagtacggtggcttcgatagccctacagttgcctattctgtcctagtagtggcaaaagttgagaagggaaaatccaagaaactgaagtcagtcaaagaattattggggataacgattatggagcgctcgtcttttgaaaagaaccccatcgacttccttgaggcgaaaggttacaaggaagtaaaaaaggatctcataattaaactaccaaagtatagtctgtttgagttagaaaatggccgaaaacggatgttggctagcgccggagagcttcaaaaggggaacgaactcgcactaccgtctaaatacgtgaatttcctgtatttagcgtcccattacgagaagttgaaaggttcacctgaagataacgaacagaagcaactttttgttgagcagcacaaacattatctcgacgaaatcatagagcaaatttcggaattcagtaagagagtcatcctagctgatgccaatctggacaaagtattaagcgcatacaacaagcacagggataaacccatacgtgagcaggcggaaaatattatccatttgtttactcttaccaacctcggcgctccagccgcattcaagtattttgacacaacgatagatcgcaaacgatacacttctaccaaggaggtgctagacgcgacactgattcaccaatccatcacgggattatatgaaactcggatagatttgtcacagcttgggggtgacaactcaaagaaaaggtcactggaggacaacgaaacggaaatcaaagtctccagagacacctggaacactaagaacatgcggtccctggaaccgccacgaagcaagaaacggatacat

SEQ ID NO: 176 - DNA, 5124 bp, Artificial Sequence
  chemically synthesized
atgcccaaaaagaagaggaaagtcagctctgggtctaccggagtgttctgggtagaaaacatccaggaagctcaagatgagcacgagaactggcacacctcccctaagatacttgccaggaactacaagatacctctcacggtggcgaaacagatcacccaggagtgcccacactgcaccaagcaaggttccggacctgctggttgtgtaatgaggtcaccaaaccattggcaggccgattgtacgcacctggataataagatcatcctgactttcgttgagagtaattctggatacatacacgcgaccctgctgagcaaggaaaacgccttgtgcacatctctggcaatcttggagtgggctagattgtttagcccaaaatctcttcacacagacaatggcacaaattttgtggccgaaccagttgtgaacttgctgaaattccttaagatcgcgcatacgactggtatcccttatcatcctgaatcacaagggatcgttgagagagctaacagaacactcaaagaaaagattcagagccatcgcgataacacccaaacacttgaagcagcactccagttggcacttataacttgtaacaaggggcgagaatccatgggggggcagactccgtgggaagtatttattaccaaccaggcccaagtaattcatgaaaaacttttgttgcagcaggctcagagttcaaagaaattctgcttttataaaataccgggggagcacgactggaaggggccaacacgggtattgtggaagggcgatggagcggtagtggttaatgatgagggaaaagggatcatcgctgtgccgcttactagaacaaagctccttattaagcctaacgggggcgggggaagcggcggtggaggtagtggagggggaggatcagataaaaagtattctattggtttagccatcggcactaattccgttggatgggctgtcataaccgatgaatacaaagtaccttcaaagaaatttaaggtgttggggaacacagaccgtcattcgattaaaaagaatcttatcggtgccctcctattcgatagtggcgaaacggcagaggcgactcgcctgaaacgaaccgctcggagaaggtatacacgtcgcaagaaccgaatatgttacttacaagaaatttttagcaatgagatggccaaagttgacgattctttctttcaccgtttggaagagtccttccttgtcgaagaggacaagaaacatgaacggcaccccatctttggaaacatagtagatgaggtggcatatcatgaaaagtacccaacgatttatcacctcagaaaaaagctagttgactcaactgataaagcggacctgaggttaatctacttggctcttgcccatatgataaagttccgtgggcactttctcattgagggtgatctaaatccggacaactcggatgtcgacaaactgttcatccagttagtacaaacctataatcagttgtttgaagagaaccctataaatgcaagtggcgtggatgcgaaggctattcttagcgcccgcctctctaaatcccgacggctagaaaacctgatcgcacaattacccggagagaagaaaaatgggttgttcggtaaccttatagcgctctcactaggcctgacaccaaattttaagtcgaacttcgacttagctgaagatgccaaattgcagcttagtaaggacacgtacgatgacgatctcgacaatctactggcacaaattggagatcagtatgcggacttatttttggctgccaaaaaccttagcgatgcaatcctcctatctgacatactgagagttaatactgagattaccaaggcgccgttatccgcttcaatgatcaaaaggtacgatgaacatcaccaagacttgacacttctcaaggccctagtccgtcagcaactgcctgagaaatataaggaaatattctttgatcagtcgaaaaacgggtacgcaggttatattgacggcggagcgagtcaagaggaattctacaagtttatcaaacccatattagagaagatggatgggacggaagagttgcttgtaaaactcaatcgcgaagatctactgcgaaagcagcggactttcgacaacggtagcattccacatcaaatccacttaggcgaattgcatgctatacttagaaggcaggaggatttttatccgttcctcaaagacaatcgtgaaaagattgagaaaatcctaacctttcgcataccttactatgtgggacccctggcccgagggaactctcggttcgcatggatgacaagaaagtccgaagaaacgattactccatggaattttgaggaagttgtcgataaaggtgcgtcagctcaatcgttcatcgagaggatgaccaactttgacaagaatttaccgaacgaaaaagtattgcctaagcacagtttactttacgagtatttcacagtgtacaatgaactcacgaaagttaagtatgtcactgagggcatgcgtaaacccgcctttctaagcggagaacagaagaaagcaatagtagatctgttattcaagaccaaccgcaaagtgacagttaagcaattgaaagaggactactttaagaaaattgaatgcttcgattctgtcgagatctccggggtagaagatcgatttaatgcgtcacttggtacgtatcatgacctcctaaagataattaaagataaggacttcctggataacgaagagaatgaagatatcttagaagatatagtgttgactcttaccctctttgaagatcgggaaatgattgaggaaagactaaaaacatacgctcacctgttcgacgataaggttatgaaacagttaaagaggcgtcgctatacgggctggggacgattgtcgcggaaacttatcaacgggataagagacaagcaaagtggtaaaactattctcgattttctaaagagcgacggcttcgccaataggaactttatgcagctgatccatgatgactctttaaccttcaaagaggatatacaaaaggcacaggtttccggacaaggggactcattgcacgaacatattgcgaatcttgctggttcgccagccatcaaaaagggcatactccagacagtcaaagtagtggatgagctagttaaggtcatgggacgtcacaaaccggaaaacattgtaatcgagatggcacgcgaaaatcaaacgactcagaaggggcaaaaaaacagtcgagagcggatgaagagaatagaagagggtattaaagaactgggcagccagatcttaaaggagcatcctgtggaaaatacccaattgcagaacgagaaactttacctctattacctacaaaatggaagggacatgtatgttgatcaggaactggacataaaccgtttatctgattacgacgtcgatgccattgtaccccaatcctttttgaaggacgattcaatcgacaataaagtgcttacacgctcggataagaaccgagggaaaagtgacaatgttccaagcgaggaagtcgtaaagaaaatgaagaactattggcggcagctcctaaatgcgaaactgataacgcaaagaaagttcgataacttaactaaagctgagaggggtggcttgtctgaacttgacaaggccggatttattaaacgtcagctcgtggaaacccgccaaatcacaaagcatgttgcacagatactagattcccgaatgaatacgaaatacgacgagaacgataagctgattcgggaagtcaaagtaatcactttaaagtcaaaattggtgtcggacttcagaaaggattttcaattctataaagttagggagataaataactaccaccatgcgcacgacgcttatcttaatgccgtcgtagggaccgcactcattaagaaatacccgaagctagaaagtgagtttgtgtatggtgattacaaagtttatgacgtccgtaagatgatcgcgaaaagcgaacaggagataggcaaggctacagccaaatacttcttttattctaacattatgaatttctttaagacggaaatcactctggcaaacggagagatacgcaaacgacctttaattgaaaccaatggggagacaggtgaaatcgtatgggataagggccgggacttcgcgacggtgagaaaagttttgtccatgccccaagtcaacatagtaaagaaaactgaggtgcagaccggagggttttcaaaggaatcgattcttccaaaaaggaatagtgataagctcatcgctcgtaaaaaggactgggacccgaaaaagtacggtggcttcgatagccctacagttgcctattctgtcctagtagtggcaaaagttgagaagggaaaatccaagaaactgaagtcagtcaaagaattattggggataacgattatggagcgctcgtcttttgaaaagaaccccatcgacttccttgaggcgaaaggttacaaggaagtaaaaaaggatctcataattaaactaccaaagtatagtctgtttgagttagaaaatggccgaaaacggatgttggctagcgccggagagcttcaaaaggggaacgaactcgcactaccgtctaaatacgtgaatttcctgtatttagcgtcccattacgagaagttgaaaggttcacctgaagataacgaacagaagcaactttttgttgagcagcacaaacattatctcgacgaaatcatagagcaaatttcggaattcagtaagagagtcatcctagctgatgccaatctggacaaagtattaagcgcatacaacaagcacagggataaacccatacgtgagcaggcggaaaatattatccatttgtttactcttaccaacctcggcgctccagccgcattcaagtattttgacacaacgatagatcgcaaacgatacacttctaccaaggaggtgctagacgcgacactgattcaccaatccatcacgggattatatgaaactcggatagatttgtcacagcttgggggtgacaactcaaagaaaaggtcactggaggacaacgaaacggaaatcaaagtctccagagacacctggaacactaagaacatgcggtccctggaaccgccacgaagcaagaaacggatacat

SEQ ID NO: 177 - DNA, 4968 bp, Artificial Sequence
  chemically synthesized
atgcccaaaaagaagaggaaagtcagctctgggtctaccggagtgttctgggtagaaaacatccaggaagctcaagatgagcacgagaactggcacacctcccctaagatacttgccaggaactacaagatacctctcacggtggcgaaacagatcacccaggagtgcccacactgcaccaagcaaggttccggacctgctggttgtgtaatgaggtcaccaaaccattggcaggccgattgtacgcacctggataataagatcatcctgactttcgttgagagtaattctggatacatacacgcgaccctgctgagcaaggaaaacgccttgtgcacatctctggcaatcttggagtgggctagattgtttagcccaaaatctcttcacacagacaatggcacaaattttgtggccgaaccagttgtgaacttgctgaaattccttaagatcgcgcatacgactggtatcccttatcatcctgaatcacaagggatcgttgagagagctaacagaacactcaaagaaaagattcagagccatcgcgataacacccaaacacttgaagcagcactccagttggcacttataacttgtaacaaggggcgagaatccatgggggggcagactccgtgggaagtatttattaccaaccaggcccaagtaattcatgaaaaacttttgttgcagcaggctcagagttcagggggcgggggaagcggcggtggaggtagtggagggggaggatcagataaaaagtattctattggtttagccatcggcactaattccgttggatgggctgtcataaccgatgaatacaaagtaccttcaaagaaatttaaggtgttggggaacacagaccgtcattcgattaaaaagaatcttatcggtgccctcctattcgatagtggcgaaacggcagaggcgactcgcctgaaacgaaccgctcggagaaggtatacacgtcgcaagaaccgaatatgttacttacaagaaatttttagcaatgagatggccaaagttgacgattctttctttcaccgtttggaagagtccttccttgtcgaagaggacaagaaacatgaacggcaccccatctttggaaacatagtagatgaggtggcatatcatgaaaagtacccaacgatttatcacctcagaaaaaagctagttgactcaactgataaagcggacctgaggttaatctacttggctcttgcccatatgataaagttccgtgggcactttctcattgagggtgatctaaatccggacaactcggatgtcgacaaactgttcatccagttagtacaaacctataatcagttgtttgaagagaaccctataaatgcaagtggcgtggatgcgaaggctattcttagcgcccgcctctctaaatcccgacggctagaaaacctgatcgcacaattacccggagagaagaaaaatgggttgttcggtaaccttatagcgctctcactaggcctgacaccaaattttaagtcgaacttcgacttagctgaagatgccaaattgcagcttagtaaggacacgtacgatgacgatctcgacaatctactggcacaaattggagatcagtatgcggacttatttttggctgccaaaaaccttagcgatgcaatcctcctatctgacatactgagagttaatactgagattaccaaggcgccgttatccgcttcaatgatcaaaaggtacgatgaacatcaccaagacttgacacttctcaaggccctagtccgtcagcaactgcctgagaaatataaggaaatattctttgatcagtcgaaaaacgggtacgcaggttatattgacggcggagcgagtcaagaggaattctacaagtttatcaaacccatattagagaagatggatgggacggaagagttgcttgtaaaactcaatcgcgaagatctactgcgaaagcagcggactttcgacaacggtagcattccacatcaaatccacttaggcgaattgcatgctatacttagaaggcaggaggatttttatccgttcctcaaagacaatcgtgaaaagattgagaaaatcctaacctttcgcataccttactatgtgggacccctggcccgagggaactctcggttcgcatggatgacaagaaagtccgaagaaacgattactccatggaattttgaggaagttgtcgataaaggtgcgtcagctcaatcgttcatcgagaggatgaccaactttgacaagaatttaccgaacgaaaaagtattgcctaagcacagtttactttacgagtatttcacagtgtacaatgaactcacgaaagttaagtatgtcactgagggcatgcgtaaacccgcctttctaagcggagaacagaagaaagcaatagtagatctgttattcaagaccaaccgcaaagtgacagttaagcaattgaaagaggactactttaagaaaattgaatgcttcgattctgtcgagatctccggggtagaagatcgatttaatgcgtcacttggtacgtatcatgacctcctaaagataattaaagataaggacttcctggataacgaagagaatgaagatatcttagaagatatagtgttgactcttaccctctttgaagatcgggaaatgattgaggaaagactaaaaacatacgctcacctgttcgacgataaggttatgaaacagttaaagaggcgtcgctatacgggctggggacgattgtcgcggaaacttatcaacgggataagagacaagcaaagtggtaaaactattctcgattttctaaagagcgacggcttcgccaataggaactttatgcagctgatccatgatgactctttaaccttcaaagaggatatacaaaaggcacaggtttccggacaaggggactcattgcacgaacatattgcgaatcttgctggttcgccagccatcaaaaagggcatactccagacagtcaaagtagtggatgagctagttaaggtcatgggacgtcacaaaccggaaaacattgtaatcgagatggcacgcgaaaatcaaacgactcagaaggggcaaaaaaacagtcgagagcggatgaagagaatagaagagggtattaaagaactgggcagccagatcttaaaggagcatcctgtggaaaatacccaattgcagaacgagaaactttacctctattacctacaaaatggaagggacatgtatgttgatcaggaactggacataaaccgtttatctgattacgacgtcgatgccattgtaccccaatcctttttgaaggacgattcaatcgacaataaagtgcttacacgctcggataagaaccgagggaaaagtgacaatgttccaagcgaggaagtcgtaaagaaaatgaagaactattggcggcagctcctaaatgcgaaactgataacgcaaagaaagttcgataacttaactaaagctgagaggggtggcttgtctgaacttgacaaggccggatttattaaacgtcagctcgtggaaacccgccaaatcacaaagcatgttgcacagatactagattcccgaatgaatacgaaatacgacgagaacgataagctgattcgggaagtcaaagtaatcactttaaagtcaaaattggtgtcggacttcagaaaggattttcaattctataaagttagggagataaataactaccaccatgcgcacgacgcttatcttaatgccgtcgtagggaccgcactcattaagaaatacccgaagctagaaagtgagtttgtgtatggtgattacaaagtttatgacgtccgtaagatgatcgcgaaaagcgaacaggagataggcaaggctacagccaaatacttcttttattctaacattatgaatttctttaagacggaaatcactctggcaaacggagagatacgcaaacgacctttaattgaaaccaatggggagacaggtgaaatcgtatgggataagggccgggacttcgcgacggtgagaaaagttttgtccatgccccaagtcaacatagtaaagaaaactgaggtgcagaccggagggttttcaaaggaatcgattcttccaaaaaggaatagtgataagctcatcgctcgtaaaaaggactgggacccgaaaaagtacggtggcttcgatagccctacagttgcctattctgtcctagtagtggcaaaagttgagaagggaaaatccaagaaactgaagtcagtcaaagaattattggggataacgattatggagcgctcgtcttttgaaaagaaccccatcgacttccttgaggcgaaaggttacaaggaagtaaaaaaggatctcataattaaactaccaaagtatagtctgtttgagttagaaaatggccgaaaacggatgttggctagcgccggagagcttcaaaaggggaacgaactcgcactaccgtctaaatacgtgaatttcctgtatttagcgtcccattacgagaagttgaaaggttcacctgaagataacgaacagaagcaactttttgttgagcagcacaaacattatctcgacgaaatcatagagcaaatttcggaattcagtaagagagtcatcctagctgatgccaatctggacaaagtattaagcgcatacaacaagcacagggataaacccatacgtgagcaggcggaaaatattatccatttgtttactcttaccaacctcggcgctccagccgcattcaagtattttgacacaacgatagatcgcaaacgatacacttctaccaaggaggtgctagacgcgacactgattcaccaatccatcacgggattatatgaaactcggatagatttgtcacagcttgggggtgacaactcaaagaaaaggtcactggaggacaacgaaacggaaatcaaagtctccagagacacctggaacactaagaacatgcggtccctggaaccgccacgaagcaagaaacggatacat

SEQ ID NO: 178 - DNA, 5517 bp, Artificial Sequence
  chemically synthesized
atgcccaaaaagaagaggaaagtcagctctatcgagaatagcagcccttatactagtgaacacttccattatacagtcacggatatcaaagaccttacgaagctgggggctatttatgataagaccaaaaagtattgggtatatcaaggcaagcccgttatgcccgatcagtttacttttgagcttctggatttcctccaccaacttactcatttgagtttctcaaagatgaaagcgctcctcgagagaagccacagcccctactatatgctcaatcgagaccgcacacttaagaacatcacggagacttgcaaggcatgcgctcaagtgaacgcttcaaagagcgcagtaaagcagggtacacgagtaaggggccatcggccaggaacacactgggaaatagatttcactgaaataaaaccgggtctctatgggtataagtatctgcttgtttttatagacacgttttccggatggatcgaggcatttccaacgaaaaaagaaactgccaaggtagtcacaaaaaaactcctggaagagatatttccacggtttggaatgccccaagttcttggcaccgacaatggaccggcgtttgtaagtaaggtgagccaaactgtcgcagacctcttgggaatagattggaagctgcactgtgcataccgcccccaatccagtgggcaagtcgaacgcatgaaccgcacaataaaagaaacgctgacgaaacttactctggcaacagggagccgcgactgggtgctgcttctccccctggcgctttaccgcgcccgcaatacccccggtccccatgggctcactccgtatgagatactctatggggcacccccgccgctcgtgaatttcccggacccggacatgacgcgagtgactaacagcccgtctttgcaggctcaccttcaagccctctatctcgttcagcacgaggtatggaggcctctcgcagccgcgtaccaagagcaattggatcgcccagtagtcccgcacccctatagggttggggacacagtatgggttaggagacatcaaaccaagaacttggaacctaggtggaaggggccctacaccgtcttgcttactacccctacggctctgaaagtagatggcatcgctgcttggatacatgccgcccatgttaaggccgcggatccgggaggaggtccatctagcagactgacttggagagtacaaaggagtcaaaacccgttgaagatcagactgacgagagaggccccagggggcgggggaagcggcggtggaggtagtggagggggaggatcagataaaaagtattctattggtttagccatcggcactaattccgttggatgggctgtcataaccgatgaatacaaagtaccttcaaagaaatttaaggtgttggggaacacagaccgtcattcgattaaaaagaatcttatcggtgccctcctattcgatagtggcgaaacggcagaggcgactcgcctgaaacgaaccgctcggagaaggtatacacgtcgcaagaaccgaatatgttacttacaagaaatttttagcaatgagatggccaaagttgacgattctttctttcaccgtttggaagagtccttccttgtcgaagaggacaagaaacatgaacggcaccccatctttggaaacatagtagatgaggtggcatatcatgaaaagtacccaacgatttatcacctcagaaaaaagctagttgactcaactgataaagcggacctgaggttaatctacttggctcttgcccatatgataaagttccgtgggcactttctcattgagggtgatctaaatccggacaactcggatgtcgacaaactgttcatccagttagtacaaacctataatcagttgtttgaagagaaccctataaatgcaagtggcgtggatgcgaaggctattcttagcgcccgcctctctaaatcccgacggctagaaaacctgatcgcacaattacccggagagaagaaaaatgggttgttcggtaaccttatagcgctctcactaggcctgacaccaaattttaagtcgaacttcgacttagctgaagatgccaaattgcagcttagtaaggacacgtacgatgacgatctcgacaatctactggcacaaattggagatcagtatgcggacttatttttggctgccaaaaaccttagcgatgcaatcctcctatctgacatactgagagttaatactgagattaccaaggcgccgttatccgcttcaatgatcaaaaggtacgatgaacatcaccaagacttgacacttctcaaggccctagtccgtcagcaactgcctgagaaatataaggaaatattctttgatcagtcgaaaaacgggtacgcaggttatattgacggcggagcgagtcaagaggaattctacaagtttatcaaacccatattagagaagatggatgggacggaagagttgcttgtaaaactcaatcgcgaagatctactgcgaaagcagcggactttcgacaacggtagcattccacatcaaatccacttaggcgaattgcatgctatacttagaaggcaggaggatttttatccgttcctcaaagacaatcgtgaaaagattgagaaaatcctaacctttcgcataccttactatgtgggacccctggcccgagggaactctcggttcgcatggatgacaagaaagtccgaagaaacgattactccatggaattttgaggaagttgtcgataaaggtgcgtcagctcaatcgttcatcgagaggatgaccaactttgacaagaatttaccgaacgaaaaagtattgcctaagcacagtttactttacgagtatttcacagtgtacaatgaactcacgaaagttaagtatgtcactgagggcatgcgtaaacccgcctttctaagcggagaacagaagaaagcaatagtagatctgttattcaagaccaaccgcaaagtgacagttaagcaattgaaagaggactactttaagaaaattgaatgcttcgattctgtcgagatctccggggtagaagatcgatttaatgcgtcacttggtacgtatcatgacctcctaaagataattaaagataaggacttcctggataacgaagagaatgaagatatcttagaagatatagtgttgactcttaccctctttgaagatcgggaaatgattgaggaaagactaaaaacatacgctcacctgttcgacgataaggttatgaaacagttaaagaggcgtcgctatacgggctggggacgattgtcgcggaaacttatcaacgggataagagacaagcaaagtggtaaaactattctcgattttctaaagagcgacggcttcgccaataggaactttatgcagctgatccatgatgactctttaaccttcaaagaggatatacaaaaggcacaggtttccggacaaggggactcattgcacgaacatattgcgaatcttgctggttcgccagccatcaaaaagggcatactccagacagtcaaagtagtggatgagctagttaaggtcatgggacgtcacaaaccggaaaacattgtaatcgagatggcacgcgaaaatcaaacgactcagaaggggcaaaaaaacagtcgagagcggatgaagagaatagaagagggtattaaagaactgggcagccagatcttaaaggagcatcctgtggaaaatacccaattgcagaacgagaaactttacctctattacctacaaaatggaagggacatgtatgttgatcaggaactggacataaaccgtttatctgattacgacgtcgatgccattgtaccccaatcctttttgaaggacgattcaatcgacaataaagtgcttacacgctcggataagaaccgagggaaaagtgacaatgttccaagcgaggaagtcgtaaagaaaatgaagaactattggcggcagctcctaaatgcgaaactgataacgcaaagaaagttcgataacttaactaaagctgagaggggtggcttgtctgaacttgacaaggccggatttattaaacgtcagctcgtggaaacccgccaaatcacaaagcatgttgcacagatactagattcccgaatgaatacgaaatacgacgagaacgataagctgattcgggaagtcaaagtaatcactttaaagtcaaaattggtgtcggacttcagaaaggattttcaattctataaagttagggagataaataactaccaccatgcgcacgacgcttatcttaatgccgtcgtagggaccgcactcattaagaaatacccgaagctagaaagtgagtttgtgtatggtgattacaaagtttatgacgtccgtaagatgatcgcgaaaagcgaacaggagataggcaaggctacagccaaatacttcttttattctaacattatgaatttctttaagacggaaatcactctggcaaacggagagatacgcaaacgacctttaattgaaaccaatggggagacaggtgaaatcgtatgggataagggccgggacttcgcgacggtgagaaaagttttgtccatgccccaagtcaacatagtaaagaaaactgaggtgcagaccggagggttttcaaaggaatcgattcttccaaaaaggaatagtgataagctcatcgctcgtaaaaaggactgggacccgaaaaagtacggtggcttcgatagccctacagttgcctattctgtcctagtagtggcaaaagttgagaagggaaaatccaagaaactgaagtcagtcaaagaattattggggataacgattatggagcgctcgtcttttgaaaagaaccccatcgacttccttgaggcgaaaggttacaaggaagtaaaaaaggatctcataattaaactaccaaagtatagtctgtttgagttagaaaatggccgaaaacggatgttggctagcgccggagagcttcaaaaggggaacgaactcgcactaccgtctaaatacgtgaatttcctgtatttagcgtcccattacgagaagttgaaaggttcacctgaagataacgaacagaagcaactttttgttgagcagcacaaacattatctcgacgaaatcatagagcaaatttcggaattcagtaagagagtcatcctagctgatgccaatctggacaaagtattaagcgcatacaacaagcacagggataaacccatacgtgagcaggcggaaaatattatccatttgtttactcttaccaacctcggcgctccagccgcattcaagtattttgacacaacgatagatcgcaaacgatacacttctaccaaggaggtgctagacgcgacactgattcaccaatccatcacgggattatatgaaactcggatagatttgtcacagcttgggggtgacaactcaaagaaaaggtcactggaggacaacgaaacggaaatcaaagtctccagagacacctggaacactaagaacatgcggtccctggaaccgccacgaagcaagaaacggatacat

SEQ ID NO: 179 - DNA, 5271 bp, Artificial Sequence
  chemically synthesized
atgcccaaaaagaagaggaaagtcagctctatcgagaatagcagcccttatactagtgaacacttccattatacagtcacggatatcaaagaccttacgaagctgggggctatttatgataagaccaaaaagtattgggtatatcaaggcaagcccgttatgcccgatcagtttacttttgagcttctggatttcctccaccaacttactcatttgagtttctcaaagatgaaagcgctcctcgagagaagccacagcccctactatatgctcaatcgagaccgcacacttaagaacatcacggagacttgcaaggcatgcgctcaagtgaacgcttcaaagagcgcagtaaagcagggtacacgagtaaggggccatcggccaggaacacactgggaaatagatttcactgaaataaaaccgggtctctatgggtataagtatctgcttgtttttatagacacgttttccggatggatcgaggcatttccaacgaaaaaagaaactgccaaggtagtcacaaaaaaactcctggaagagatatttccacggtttggaatgccccaagttcttggcaccgacaatggaccggcgtttgtaagtaaggtgagccaaactgtcgcagacctcttgggaatagattggaagctgcactgtgcataccgcccccaatccagtgggcaagtcgaacgcatgaaccgcacaataaaagaaacgctgacgaaacttactctggcaacagggagccgcgactgggtgctgcttctccccctggcgctttaccgcgcccgcaatacccccggtccccatgggctcactccgtatgagatactctatggggcacccccgccgctcgtgaatttcccggacccggacatgacgcgagtgactaacagcccgtctttgcaggctcaccttcaagccctctatctcgttcagcacgaggtatggaggcctctcgcagccgcgtaccaagagcaattggatcgcccagtagtcccgcaccccgggggcgggggaagcggcggtggaggtagtggagggggaggatcagataaaaagtattctattggtttagccatcggcactaattccgttggatgggctgtcataaccgatgaatacaaagtaccttcaaagaaatttaaggtgttggggaacacagaccgtcattcgattaaaaagaatcttatcggtgccctcctattcgatagtggcgaaacggcagaggcgactcgcctgaaacgaaccgctcggagaaggtatacacgtcgcaagaaccgaatatgttacttacaagaaatttttagcaatgagatggccaaagttgacgattctttctttcaccgtttggaagagtccttccttgtcgaagaggacaagaaacatgaacggcaccccatctttggaaacatagtagatgaggtggcatatcatgaaaagtacccaacgatttatcacctcagaaaaaagctagttgactcaactgataaagcggacctgaggttaatctacttggctcttgcccatatgataaagttccgtgggcactttctcattgagggtgatctaaatccggacaactcggatgtcgacaaactgttcatccagttagtacaaacctataatcagttgtttgaagagaaccctataaatgcaagtggcgtggatgcgaaggctattcttagcgcccgcctctctaaatcccgacggctagaaaacctgatcgcacaattacccggagagaagaaaaatgggttgttcggtaaccttatagcgctctcactaggcctgacaccaaattttaagtcgaacttcgacttagctgaagatgccaaattgcagcttagtaaggacacgtacgatgacgatctcgacaatctactggcacaaattggagatcagtatgcggacttatttttggctgccaaaaaccttagcgatgcaatcctcctatctgacatactgagagttaatactgagattaccaaggcgccgttatccgcttcaatgatcaaaaggtacgatgaacatcaccaagacttgacacttctcaaggccctagtccgtcagcaactgcctgagaaatataaggaaatattctttgatcagtcgaaaaacgggtacgcaggttatattgacggcggagcgagtcaagaggaattctacaagtttatcaaacccatattagagaagatggatgggacggaagagttgcttgtaaaactcaatcgcgaagatctactgcgaaagcagcggactttcgacaacggtagcattccacatcaaatccacttaggcgaattgcatgctatacttagaaggcaggaggatttttatccgttcctcaaagacaatcgtgaaaagattgagaaaatcctaacctttcgcataccttactatgtgggacccctggcccgagggaactctcggttcgcatggatgacaagaaagtccgaagaaacgattactccatggaattttgaggaagttgtcgataaaggtgcgtcagctcaatcgttcatcgagaggatgaccaactttgacaagaatttaccgaacgaaaaagtattgcctaagcacagtttactttacgagtatttcacagtgtacaatgaactcacgaaagttaagtatgtcactgagggcatgcgtaaacccgcctttctaagcggagaacagaagaaagcaatagtagatctgttattcaagaccaaccgcaaagtgacagttaagcaattgaaagaggactactttaagaaaattgaatgcttcgattctgtcgagatctccggggtagaagatcgatttaatgcgtcacttggtacgtatcatgacctcctaaagataattaaagataaggacttcctggataacgaagagaatgaagatatcttagaagatatagtgttgactcttaccctctttgaagatcgggaaatgattgaggaaagactaaaaacatacgctcacctgttcgacgataaggttatgaaacagttaaagaggcgtcgctatacgggctggggacgattgtcgcggaaacttatcaacgggataagagacaagcaaagtggtaaaactattctcgattttctaaagagcgacggcttcgccaataggaactttatgcagctgatccatgatgactctttaaccttcaaagaggatatacaaaaggcacaggtttccggacaaggggactcattgcacgaacatattgcgaatcttgctggttcgccagccatcaaaaagggcatactccagacagtcaaagtagtggatgagctagttaaggtcatgggacgtcacaaaccggaaaacattgtaatcgagatggcacgcgaaaatcaaacgactcagaaggggcaaaaaaacagtcgagagcggatgaagagaatagaagagggtattaaagaactgggcagccagatcttaaaggagcatcctgtggaaaatacccaattgcagaacgagaaactttacctctattacctacaaaatggaagggacatgtatgttgatcaggaactggacataaaccgtttatctgattacgacgtcgatgccattgtaccccaatcctttttgaaggacgattcaatcgacaataaagtgcttacacgctcggataagaaccgagggaaaagtgacaatgttccaagcgaggaagtcgtaaagaaaatgaagaactattggcggcagctcctaaatgcgaaactgataacgcaaagaaagttcgataacttaactaaagctgagaggggtggcttgtctgaacttgacaaggccggatttattaaacgtcagctcgtggaaacccgccaaatcacaaagcatgttgcacagatactagattcccgaatgaatacgaaatacgacgagaacgataagctgattcgggaagtcaaagtaatcactttaaagtcaaaattggtgtcggacttcagaaaggattttcaattctataaagttagggagataaataactaccaccatgcgcacgacgcttatcttaatgccgtcgtagggaccgcactcattaagaaatacccgaagctagaaagtgagtttgtgtatggtgattacaaagtttatgacgtccgtaagatgatcgcgaaaagcgaacaggagataggcaaggctacagccaaatacttcttttattctaacattatgaatttctttaagacggaaatcactctggcaaacggagagatacgcaaacgacctttaattgaaaccaatggggagacaggtgaaatcgtatgggataagggccgggacttcgcgacggtgagaaaagttttgtccatgccccaagtcaacatagtaaagaaaactgaggtgcagaccggagggttttcaaaggaatcgattcttccaaaaaggaatagtgataagctcatcgctcgtaaaaaggactgggacccgaaaaagtacggtggcttcgatagccctacagttgcctattctgtcctagtagtggcaaaagttgagaagggaaaatccaagaaactgaagtcagtcaaagaattattggggataacgattatggagcgctcgtcttttgaaaagaaccccatcgacttccttgaggcgaaaggttacaaggaagtaaaaaaggatctcataattaaactaccaaagtatagtctgtttgagttagaaaatggccgaaaacggatgttggctagcgccggagagcttcaaaaggggaacgaactcgcactaccgtctaaatacgtgaatttcctgtatttagcgtcccattacgagaagttgaaaggttcacctgaagataacgaacagaagcaactttttgttgagcagcacaaacattatctcgacgaaatcatagagcaaatttcggaattcagtaagagagtcatcctagctgatgccaatctggacaaagtattaagcgcatacaacaagcacagggataaacccatacgtgagcaggcggaaaatattatccatttgtttactcttaccaacctcggcgctccagccgcattcaagtattttgacacaacgatagatcgcaaacgatacacttctaccaaggaggtgctagacgcgacactgattcaccaatccatcacgggattatatgaaactcggatagatttgtcacagcttgggggtgacaactcaaagaaaaggtcactggaggacaacgaaacggaaatcaaagtctccagagacacctggaacactaagaacatgcggtccctggaaccgccacgaagcaagaaacggatacat

SEQ ID NO: 180 - DNA, 5247 bp, Artificial Sequence
  chemically synthesized
atgcccaaaaagaagaggaaagtcagctctttggagagtgctcaggaatctcacgcacttcaccatcagaatgctgccgcgttgagattccaattccatataactcgcgaacaagcgagagaaatcgtgaagttgtgccctaactgcccggactgggggcacgccccgcagctcggcgtaaaccccagagggcttaaaccaagggttctttggcagatggatgtgacccatgtgtccgagtttgggaagctgaaatatgtccacgttactgtggatacttactcacattttacattcgccactgctcgcacaggagaagctaccaaggatgtgctccaacacctggcacaaagctttgcgtacatgggaataccacagaaaattaaaactgacaacgcacctgcttatgtgagccgatccattcaggagtttttggcacgctggaagatcagtcatgtaacaggcattccgtataatccccagggtcaggcaattgtagaacgcactcaccaaaacatcaaggctcaactgaataagcttcagaaggctgggaaatactacacacctcatcatctcttggcacacgcactgtttgtcttgaaccacgtaaatatggacaatcagggtcacacagccgctgaacgacattgggggccgatctccgctgacccgaaacctatggttatgtggaaagatctgttgacgggaagctggaagggcccagacgttcttattactgcgggtcgcggctacgcttgtgtgttcccgcaagacgcggaaactcccatctgggttccagatcgctttattcgaccgttcactgagaggaaagaggccacacctaccccgggtactgccgagaagacacccccaagagatgagaaagatcaacaggagagcccaaagaatgagtctagcccccaccaaagagaggacggtttggcaacatccgccggagtcgatcttcggtcagggggtggcccggggggcgggggaagcggcggtggaggtagtggagggggaggatcagataaaaagtattctattggtttagccatcggcactaattccgttggatgggctgtcataaccgatgaatacaaagtaccttcaaagaaatttaaggtgttggggaacacagaccgtcattcgattaaaaagaatcttatcggtgccctcctattcgatagtggcgaaacggcagaggcgactcgcctgaaacgaaccgctcggagaaggtatacacgtcgcaagaaccgaatatgttacttacaagaaatttttagcaatgagatggccaaagttgacgattctttctttcaccgtttggaagagtccttccttgtcgaagaggacaagaaacatgaacggcaccccatctttggaaacatagtagatgaggtggcatatcatgaaaagtacccaacgatttatcacctcagaaaaaagctagttgactcaactgataaagcggacctgaggttaatctacttggctcttgcccatatgataaagttccgtgggcactttctcattgagggtgatctaaatccggacaactcggatgtcgacaaactgttcatccagttagtacaaacctataatcagttgtttgaagagaaccctataaatgcaagtggcgtggatgcgaaggctattcttagcgcccgcctctctaaatcccgacggctagaaaacctgatcgcacaattacccggagagaagaaaaatgggttgttcggtaaccttatagcgctctcactaggcctgacaccaaattttaagtcgaacttcgacttagctgaagatgccaaattgcagcttagtaaggacacgtacgatgacgatctcgacaatctactggcacaaattggagatcagtatgcggacttatttttggctgccaaaaaccttagcgatgcaatcctcctatctgacatactgagagttaatactgagattaccaaggcgccgttatccgcttcaatgatcaaaaggtacgatgaacatcaccaagacttgacacttctcaaggccctagtccgtcagcaactgcctgagaaatataaggaaatattctttgatcagtcgaaaaacgggtacgcaggttatattgacggcggagcgagtcaagaggaattctacaagtttatcaaacccatattagagaagatggatgggacggaagagttgcttgtaaaactcaatcgcgaagatctactgcgaaagcagcggactttcgacaacggtagcattccacatcaaatccacttaggcgaattgcatgctatacttagaaggcaggaggatttttatccgttcctcaaagacaatcgtgaaaagattgagaaaatcctaacctttcgcataccttactatgtgggacccctggcccgagggaactctcggttcgcatggatgacaagaaagtccgaagaaacgattactccatggaattttgaggaagttgtcgataaaggtgcgtcagctcaatcgttcatcgagaggatgaccaactttgacaagaatttaccgaacgaaaaagtattgcctaagcacagtttactttacgagtatttcacagtgtacaatgaactcacgaaagttaagtatgtcactgagggcatgcgtaaacccgcctttctaagcggagaacagaagaaagcaatagtagatctgttattcaagaccaaccgcaaagtgacagttaagcaattgaaagaggactactttaagaaaattgaatgcttcgattctgtcgagatctccggggtagaagatcgatttaatgcgtcacttggtacgtatcatgacctcctaaagataattaaagataaggacttcctggataacgaagagaatgaagatatcttagaagatatagtgttgactcttaccctctttgaagatcgggaaatgattgaggaaagactaaaaacatacgctcacctgttcgacgataaggttatgaaacagttaaagaggcgtcgctatacgggctggggacgattgtcgcggaaacttatcaacgggataagagacaagcaaagtggtaaaactattctcgattttctaaagagcgacggcttcgccaataggaactttatgcagctgatccatgatgactctttaaccttcaaagaggatatacaaaaggcacaggtttccggacaaggggactcattgcacgaacatattgcgaatcttgctggttcgccagccatcaaaaagggcatactccagacagtcaaagtagtggatgagctagttaaggtcatgggacgtcacaaaccggaaaacattgtaatcgagatggcacgcgaaaatcaaacgactcagaaggggcaaaaaaacagtcgagagcggatgaagagaatagaagagggtattaaagaactgggcagccagatcttaaaggagcatcctgtggaaaatacccaattgcagaacgagaaactttacctctattacctacaaaatggaagggacatgtatgttgatcaggaactggacataaaccgtttatctgattacgacgtcgatgccattgtaccccaatcctttttgaaggacgattcaatcgacaataaagtgcttacacgctcggataagaaccgagggaaaagtgacaatgttccaagcgaggaagtcgtaaagaaaatgaagaactattggcggcagctcctaaatgcgaaactgataacgcaaagaaagttcgataacttaactaaagctgagaggggtggcttgtctgaacttgacaaggccggatttattaaacgtcagctcgtggaaacccgccaaatcacaaagcatgttgcacagatactagattcccgaatgaatacgaaatacgacgagaacgataagctgattcgggaagtcaaagtaatcactttaaagtcaaaattggtgtcggacttcagaaaggattttcaattctataaagttagggagataaataactaccaccatgcgcacgacgcttatcttaatgccgtcgtagggaccgcactcattaagaaatacccgaagctagaaagtgagtttgtgtatggtgattacaaagtttatgacgtccgtaagatgatcgcgaaaagcgaacaggagataggcaaggctacagccaaatacttcttttattctaacattatgaatttctttaagacggaaatcactctggcaaacggagagatacgcaaacgacctttaattgaaaccaatggggagacaggtgaaatcgtatgggataagggccgggacttcgcgacggtgagaaaagttttgtccatgccccaagtcaacatagtaaagaaaactgaggtgcagaccggagggttttcaaaggaatcgattcttccaaaaaggaatagtgataagctcatcgctcgtaaaaaggactgggacccgaaaaagtacggtggcttcgatagccctacagttgcctattctgtcctagtagtggcaaaagttgagaagggaaaatccaagaaactgaagtcagtcaaagaattattggggataacgattatggagcgctcgtcttttgaaaagaaccccatcgacttccttgaggcgaaaggttacaaggaagtaaaaaaggatctcataattaaactaccaaagtatagtctgtttgagttagaaaatggccgaaaacggatgttggctagcgccggagagcttcaaaaggggaacgaactcgcactaccgtctaaatacgtgaatttcctgtatttagcgtcccattacgagaagttgaaaggttcacctgaagataacgaacagaagcaactttttgttgagcagcacaaacattatctcgacgaaatcatagagcaaatttcggaattcagtaagagagtcatcctagctgatgccaatctggacaaagtattaagcgcatacaacaagcacagggataaacccatacgtgagcaggcggaaaatattatccatttgtttactcttaccaacctcggcgctccagccgcattcaagtattttgacacaacgatagatcgcaaacgatacacttctaccaaggaggtgctagacgcgacactgattcaccaatccatcacgggattatatgaaactcggatagatttgtcacagcttgggggtgacaactcaaagaaaaggtcactggaggacaacgaaacggaaatcaaagtctccagagacacctggaacactaagaacatgcggtccctggaaccgccacgaagcaagaaacggatacat

SEQ ID NO: 181 - DNA, 4929 bp, Artificial Sequence
  chemically synthesized
atgcccaaaaagaagaggaaagtcagctctttggagagtgctcaggaatctcacgcacttcaccatcagaatgctgccgcgttgagattccaattccatataactcgcgaacaagcgagagaaatcgtgaagttgtgccctaactgcccggactgggggcacgccccgcagctcggcgtaaaccccagagggcttaaaccaagggttctttggcagatggatgtgacccatgtgtccgagtttgggaagctgaaatatgtccacgttactgtggatacttactcacattttacattcgccactgctcgcacaggagaagctaccaaggatgtgctccaacacctggcacaaagctttgcgtacatgggaataccacagaaaattaaaactgacaacgcacctgcttatgtgagccgatccattcaggagtttttggcacgctggaagatcagtcatgtaacaggcattccgtataatccccagggtcaggcaattgtagaacgcactcaccaaaacatcaaggctcaactgaataagcttcagaaggctgggaaatactacacacctcatcatctcttggcacacgcactgtttgtcttgaaccacgtaaatatggacaatcagggtcacacagccgctgaacgacattgggggccgatctccgctgggggcgggggaagcggcggtggaggtagtggagggggaggatcagataaaaagtattctattggtttagccatcggcactaattccgttggatgggctgtcataaccgatgaatacaaagtaccttcaaagaaatttaaggtgttggggaacacagaccgtcattcgattaaaaagaatcttatcggtgccctcctattcgatagtggcgaaacggcagaggcgactcgcctgaaacgaaccgctcggagaaggtatacacgtcgcaagaaccgaatatgttacttacaagaaatttttagcaatgagatggccaaagttgacgattctttctttcaccgtttggaagagtccttccttgtcgaagaggacaagaaacatgaacggcaccccatctttggaaacatagtagatgaggtggcatatcatgaaaagtacccaacgatttatcacctcagaaaaaagctagttgactcaactgataaagcggacctgaggttaatctacttggctcttgcccatatgataaagttccgtgggcactttctcattgagggtgatctaaatccggacaactcggatgtcgacaaactgttcatccagttagtacaaacctataatcagttgtttgaagagaaccctataaatgcaagtggcgtggatgcgaaggctattcttagcgcccgcctctctaaatcccgacggctagaaaacctgatcgcacaattacccggagagaagaaaaatgggttgttcggtaaccttatagcgctctcactaggcctgacaccaaattttaagtcgaacttcgacttagctgaagatgccaaattgcagcttagtaaggacacgtacgatgacgatctcgacaatctactggcacaaattggagatcagtatgcggacttatttttggctgccaaaaaccttagcgatgcaatcctcctatctgacatactgagagttaatactgagattaccaaggcgccgttatccgcttcaatgatcaaaaggtacgatgaacatcaccaagacttgacacttctcaaggccctagtccgtcagcaactgcctgagaaatataaggaaatattctttgatcagtcgaaaaacgggtacgcaggttatattgacggcggagcgagtcaagaggaattctacaagtttatcaaacccatattagagaagatggatgggacggaagagttgcttgtaaaactcaatcgcgaagatctactgcgaaagcagcggactttcgacaacggtagcattccacatcaaatccacttaggcgaattgcatgctatacttagaaggcaggaggatttttatccgttcctcaaagacaatcgtgaaaagattgagaaaatcctaacctttcgcataccttactatgtgggacccctggcccgagggaactctcggttcgcatggatgacaagaaagtccgaagaaacgattactccatggaattttgaggaagttgtcgataaaggtgcgtcagctcaatcgttcatcgagaggatgaccaactttgacaagaatttaccgaacgaaaaagtattgcctaagcacagtttactttacgagtatttcacagtgtacaatgaactcacgaaagttaagtatgtcactgagggcatgcgtaaacccgcctttctaagcggagaacagaagaaagcaatagtagatctgttattcaagaccaaccgcaaagtgacagttaagcaattgaaagaggactactttaagaaaattgaatgcttcgattctgtcgagatctccggggtagaagatcgatttaatgcgtcacttggtacgtatcatgacctcctaaagataattaaagataaggacttcctggataacgaagagaatgaagatatcttagaagatatagtgttgactcttaccctctttgaagatcgggaaatgattgaggaaagactaaaaacatacgctcacctgttcgacgataaggttatgaaacagttaaagaggcgtcgctatacgggctggggacgattgtcgcggaaacttatcaacgggataagagacaagcaaagtggtaaaactattctcgattttctaaagagcgacggcttcgccaataggaactttatgcagctgatccatgatgactctttaaccttcaaagaggatatacaaaaggcacaggtttccggacaaggggactcattgcacgaacatattgcgaatcttgctggttcgccagccatcaaaaagggcatactccagacagtcaaagtagtggatgagctagttaaggtcatgggacgtcacaaaccggaaaacattgtaatcgagatggcacgcgaaaatcaaacgactcagaaggggcaaaaaaacagtcgagagcggatgaagagaatagaagagggtattaaagaactgggcagccagatcttaaaggagcatcctgtggaaaatacccaattgcagaacgagaaactttacctctattacctacaaaatggaagggacatgtatgttgatcaggaactggacataaaccgtttatctgattacgacgtcgatgccattgtaccccaatcctttttgaaggacgattcaatcgacaataaagtgcttacacgctcggataagaaccgagggaaaagtgacaatgttccaagcgaggaagtcgtaaagaaaatgaagaactattggcggcagctcctaaatgcgaaactgataacgcaaagaaagttcgataacttaactaaagctgagaggggtggcttgtctgaacttgacaaggccggatttattaaacgtcagctcgtggaaacccgccaaatcacaaagcatgttgcacagatactagattcccgaatgaatacgaaatacgacgagaacgataagctgattcgggaagtcaaagtaatcactttaaagtcaaaattggtgtcggacttcagaaaggattttcaattctataaagttagggagataaataactaccaccatgcgcacgacgcttatcttaatgccgtcgtagggaccgcactcattaagaaatacccgaagctagaaagtgagtttgtgtatggtgattacaaagtttatgacgtccgtaagatgatcgcgaaaagcgaacaggagataggcaaggctacagccaaatacttcttttattctaacattatgaatttctttaagacggaaatcactctggcaaacggagagatacgcaaacgacctttaattgaaaccaatggggagacaggtgaaatcgtatgggataagggccgggacttcgcgacggtgagaaaagttttgtccatgccccaagtcaacatagtaaagaaaactgaggtgcagaccggagggttttcaaaggaatcgattcttccaaaaaggaatagtgataagctcatcgctcgtaaaaaggactgggacccgaaaaagtacggtggcttcgatagccctacagttgcctattctgtcctagtagtggcaaaagttgagaagggaaaatccaagaaactgaagtcagtcaaagaattattggggataacgattatggagcgctcgtcttttgaaaagaaccccatcgacttccttgaggcgaaaggttacaaggaagtaaaaaaggatctcataattaaactaccaaagtatagtctgtttgagttagaaaatggccgaaaacggatgttggctagcgccggagagcttcaaaaggggaacgaactcgcactaccgtctaaatacgtgaatttcctgtatttagcgtcccattacgagaagttgaaaggttcacctgaagataacgaacagaagcaactttttgttgagcagcacaaacattatctcgacgaaatcatagagcaaatttcggaattcagtaagagagtcatcctagctgatgccaatctggacaaagtattaagcgcatacaacaagcacagggataaacccatacgtgagcaggcggaaaatattatccatttgtttactcttaccaacctcggcgctccagccgcattcaagtattttgacacaacgatagatcgcaaacgatacacttctaccaaggaggtgctagacgcgacactgattcaccaatccatcacgggattatatgaaactcggatagatttgtcacagcttgggggtgacaactcaaagaaaaggtcactggaggacaacgaaacggaaatcaaagtctccagagacacctggaacactaagaacatgcggtccctggaaccgccacgaagcaagaaacggatacat

SEQ ID NO: 182 - DNA, 5433 bp, Artificial Sequence
  chemically synthesized
atgcccaaaaagaagaggaaagtcagctctgtcttgaaaaagggcgatgcgctggcgagcacggatcttgtaatggaatattctgaaactgacgaaaagtttacagcaggagctgaactgcacgatggagtgtttatgcggggcgatcttattgtccctccactcgaaatgctccacgccatactcttggcaatacacggggtgagtcatacacataagggtgggataatgtcatacttttctaagttttggacccaccctaaagctagtcagacgatcgatctcatcctcggtcactgccaaatctgccttaaacataacccaaagtataagtccaggctccaaggacaccgccctttgcccagtcgacccttcgcacacttgcaaattgattttgtccaaatgtgcgtaaaaaagcctatgtatgcacttgttatcattgatgtatttagtaaatggccagagataattccttgtaataaagaagacgcaaaaactgtatgcgatattctcatgaaggacataatccctagatggggcctgcctgatcaaattgacagcgatcaaggcacgcatttcacagcaaagataagccaagaactgacccactccattggagtggcatggaaactccactgtccaggtcacccccggagttcagggatcgttgagcgcacgaaccgaacattgaaatctaagattatcaaggcccaggagcagcttcaactgagtaaatggactgaggttttgccctacgtgctgctcgaaatgagagcaactcccaagaagcacggacttagccctcatgaaatcgtaatggggcgacccatgaaaacaacctacctttccgatatgtcccctctgtgggccactgacactttggtgacttacatgaacaagttgacacgacaactctctgcctaccaccagcaagttgtagaccagtggccctccactagcttgccgcccggacctgaacccggatcttggtgtatgctcagaaatccgaaaaagtccagcaactgggaaggtccctttctcatcctcttgtctacgcctacagcagttaaggttgagggaaggccaacgtggattcatctcgatcattgtaaattgctgcgcagttcactgtccagctctttgggtggcccggtaaatcaactgttgagcgggggcgggggaagcggcggtggaggtagtggagggggaggatcagataaaaagtattctattggtttagccatcggcactaattccgttggatgggctgtcataaccgatgaatacaaagtaccttcaaagaaatttaaggtgttggggaacacagaccgtcattcgattaaaaagaatcttatcggtgccctcctattcgatagtggcgaaacggcagaggcgactcgcctgaaacgaaccgctcggagaaggtatacacgtcgcaagaaccgaatatgttacttacaagaaatttttagcaatgagatggccaaagttgacgattctttctttcaccgtttggaagagtccttccttgtcgaagaggacaagaaacatgaacggcaccccatctttggaaacatagtagatgaggtggcatatcatgaaaagtacccaacgatttatcacctcagaaaaaagctagttgactcaactgataaagcggacctgaggttaatctacttggctcttgcccatatgataaagttccgtgggcactttctcattgagggtgatctaaatccggacaactcggatgtcgacaaactgttcatccagttagtacaaacctataatcagttgtttgaagagaaccctataaatgcaagtggcgtggatgcgaaggctattcttagcgcccgcctctctaaatcccgacggctagaaaacctgatcgcacaattacccggagagaagaaaaatgggttgttcggtaaccttatagcgctctcactaggcctgacaccaaattttaagtcgaacttcgacttagctgaagatgccaaattgcagcttagtaaggacacgtacgatgacgatctcgacaatctactggcacaaattggagatcagtatgcggacttatttttggctgccaaaaaccttagcgatgcaatcctcctatctgacatactgagagttaatactgagattaccaaggcgccgttatccgcttcaatgatcaaaaggtacgatgaacatcaccaagacttgacacttctcaaggccctagtccgtcagcaactgcctgagaaatataaggaaatattctttgatcagtcgaaaaacgggtacgcaggttatattgacggcggagcgagtcaagaggaattctacaagtttatcaaacccatattagagaagatggatgggacggaagagttgcttgtaaaactcaatcgcgaagatctactgcgaaagcagcggactttcgacaacggtagcattccacatcaaatccacttaggcgaattgcatgctatacttagaaggcaggaggatttttatccgttcctcaaagacaatcgtgaaaagattgagaaaatcctaacctttcgcataccttactatgtgggacccctggcccgagggaactctcggttcgcatggatgacaagaaagtccgaagaaacgattactccatggaattttgaggaagttgtcgataaaggtgcgtcagctcaatcgttcatcgagaggatgaccaactttgacaagaatttaccgaacgaaaaagtattgcctaagcacagtttactttacgagtatttcacagtgtacaatgaactcacgaaagttaagtatgtcactgagggcatgcgtaaacccgcctttctaagcggagaacagaagaaagcaatagtagatctgttattcaagaccaaccgcaaagtgacagttaagcaattgaaagaggactactttaagaaaattgaatgcttcgattctgtcgagatctccggggtagaagatcgatttaatgcgtcacttggtacgtatcatgacctcctaaagataattaaagataaggacttcctggataacgaagagaatgaagatatcttagaagatatagtgttgactcttaccctctttgaagatcgggaaatgattgaggaaagactaaaaacatacgctcacctgttcgacgataaggttatgaaacagttaaagaggcgtcgctatacgggctggggacgattgtcgcggaaacttatcaacgggataagagacaagcaaagtggtaaaactattctcgattttctaaagagcgacggcttcgccaataggaactttatgcagctgatccatgatgactctttaaccttcaaagaggatatacaaaaggcacaggtttccggacaaggggactcattgcacgaacatattgcgaatcttgctggttcgccagccatcaaaaagggcatactccagacagtcaaagtagtggatgagctagttaaggtcatgggacgtcacaaaccggaaaacattgtaatcgagatggcacgcgaaaatcaaacgactcagaaggggcaaaaaaacagtcgagagcggatgaagagaatagaagagggtattaaagaactgggcagccagatcttaaaggagcatcctgtggaaaatacccaattgcagaacgagaaactttacctctattacctacaaaatggaagggacatgtatgttgatcaggaactggacataaaccgtttatctgattacgacgtcgatgccattgtaccccaatcctttttgaaggacgattcaatcgacaataaagtgcttacacgctcggataagaaccgagggaaaagtgacaatgttccaagcgaggaagtcgtaaagaaaatgaagaactattggcggcagctcctaaatgcgaaactgataacgcaaagaaagttcgataacttaactaaagctgagaggggtggcttgtctgaacttgacaaggccggatttattaaacgtcagctcgtggaaacccgccaaatcacaaagcatgttgcacagatactagattcccgaatgaatacgaaatacgacgagaacgataagctgattcgggaagtcaaagtaatcactttaaagtcaaaattggtgtcggacttcagaaaggattttcaattctataaagttagggagataaataactaccaccatgcgcacgacgcttatcttaatgccgtcgtagggaccgcactcattaagaaatacccgaagctagaaagtgagtttgtgtatggtgattacaaagtttatgacgtccgtaagatgatcgcgaaaagcgaacaggagataggcaaggctacagccaaatacttcttttattctaacattatgaatttctttaagacggaaatcactctggcaaacggagagatacgcaaacgacctttaattgaaaccaatggggagacaggtgaaatcgtatgggataagggccgggacttcgcgacggtgagaaaagttttgtccatgccccaagtcaacatagtaaagaaaactgaggtgcagaccggagggttttcaaaggaatcgattcttccaaaaaggaatagtgataagctcatcgctcgtaaaaaggactgggacccgaaaaagtacggtggcttcgatagccctacagttgcctattctgtcctagtagtggcaaaagttgagaagggaaaatccaagaaactgaagtcagtcaaagaattattggggataacgattatggagcgctcgtcttttgaaaagaaccccatcgacttccttgaggcgaaaggttacaaggaagtaaaaaaggatctcataattaaactaccaaagtatagtctgtttgagttagaaaatggccgaaaacggatgttggctagcgccggagagcttcaaaaggggaacgaactcgcactaccgtctaaatacgtgaatttcctgtatttagcgtcccattacgagaagttgaaaggttcacctgaagataacgaacagaagcaactttttgttgagcagcacaaacattatctcgacgaaatcatagagcaaatttcggaattcagtaagagagtcatcctagctgatgccaatctggacaaagtattaagcgcatacaacaagcacagggataaacccatacgtgagcaggcggaaaatattatccatttgtttactcttaccaacctcggcgctccagccgcattcaagtattttgacacaacgatagatcgcaaacgatacacttctaccaaggaggtgctagacgcgacactgattcaccaatccatcacgggattatatgaaactcggatagatttgtcacagcttgggggtgacaactcaaagaaaaggtcactggaggacaacgaaacggaaatcaaagtctccagagacacctggaacactaagaacatgcggtccctggaaccgccacgaagcaagaaacggatacat

SEQ ID NO: 183 - DNA, 5226 bp, Artificial Sequence
  chemically synthesized
atgcccaaaaagaagaggaaagtcagctctgtcttgaaaaagggcgatgcgctggcgagcacggatcttgtaatggaatattctgaaactgacgaaaagtttacagcaggagctgaactgcacgatggagtgtttatgcggggcgatcttattgtccctccactcgaaatgctccacgccatactcttggcaatacacggggtgagtcatacacataagggtgggataatgtcatacttttctaagttttggacccaccctaaagctagtcagacgatcgatctcatcctcggtcactgccaaatctgccttaaacataacccaaagtataagtccaggctccaaggacaccgccctttgcccagtcgacccttcgcacacttgcaaattgattttgtccaaatgtgcgtaaaaaagcctatgtatgcacttgttatcattgatgtatttagtaaatggccagagataattccttgtaataaagaagacgcaaaaactgtatgcgatattctcatgaaggacataatccctagatggggcctgcctgatcaaattgacagcgatcaaggcacgcatttcacagcaaagataagccaagaactgacccactccattggagtggcatggaaactccactgtccaggtcacccccggagttcagggatcgttgagcgcacgaaccgaacattgaaatctaagattatcaaggcccaggagcagcttcaactgagtaaatggactgaggttttgccctacgtgctgctcgaaatgagagcaactcccaagaagcacggacttagccctcatgaaatcgtaatggggcgacccatgaaaacaacctacctttccgatatgtcccctctgtgggccactgacactttggtgacttacatgaacaagttgacacgacaactctctgcctaccaccagcaagttgtagaccagtggccctccactagcttggggggcgggggaagcggcggtggaggtagtggagggggaggatcagataaaaagtattctattggtttagccatcggcactaattccgttggatgggctgtcataaccgatgaatacaaagtaccttcaaagaaatttaaggtgttggggaacacagaccgtcattcgattaaaaagaatcttatcggtgccctcctattcgatagtggcgaaacggcagaggcgactcgcctgaaacgaaccgctcggagaaggtatacacgtcgcaagaaccgaatatgttacttacaagaaatttttagcaatgagatggccaaagttgacgattctttctttcaccgtttggaagagtccttccttgtcgaagaggacaagaaacatgaacggcaccccatctttggaaacatagtagatgaggtggcatatcatgaaaagtacccaacgatttatcacctcagaaaaaagctagttgactcaactgataaagcggacctgaggttaatctacttggctcttgcccatatgataaagttccgtgggcactttctcattgagggtgatctaaatccggacaactcggatgtcgacaaactgttcatccagttagtacaaacctataatcagttgtttgaagagaaccctataaatgcaagtggcgtggatgcgaaggctattcttagcgcccgcctctctaaatcccgacggctagaaaacctgatcgcacaattacccggagagaagaaaaatgggttgttcggtaaccttatagcgctctcactaggcctgacaccaaattttaagtcgaacttcgacttagctgaagatgccaaattgcagcttagtaaggacacgtacgatgacgatctcgacaatctactggcacaaattggagatcagtatgcggacttatttttggctgccaaaaaccttagcgatgcaatcctcctatctgacatactgagagttaatactgagattaccaaggcgccgttatccgcttcaatgatcaaaaggtacgatgaacatcaccaagacttgacacttctcaaggccctagtccgtcagcaactgcctgagaaatataaggaaatattctttgatcagtcgaaaaacgggtacgcaggttatattgacggcggagcgagtcaagaggaattctacaagtttatcaaacccatattagagaagatggatgggacggaagagttgcttgtaaaactcaatcgcgaagatctactgcgaaagcagcggactttcgacaacggtagcattccacatcaaatccacttaggcgaattgcatgctatacttagaaggcaggaggatttttatccgttcctcaaagacaatcgtgaaaagattgagaaaatcctaacctttcgcataccttactatgtgggacccctggcccgagggaactctcggttcgcatggatgacaagaaagtccgaagaaacgattactccatggaattttgaggaagttgtcgataaaggtgcgtcagctcaatcgttcatcgagaggatgaccaactttgacaagaatttaccgaacgaaaaagtattgcctaagcacagtttactttacgagtatttcacagtgtacaatgaactcacgaaagttaagtatgtcactgagggcatgcgtaaacccgcctttctaagcggagaacagaagaaagcaatagtagatctgttattcaagaccaaccgcaaagtgacagttaagcaattgaaagaggactactttaagaaaattgaatgcttcgattctgtcgagatctccggggtagaagatcgatttaatgcgtcacttggtacgtatcatgacctcctaaagataattaaagataaggacttcctggataacgaagagaatgaagatatcttagaagatatagtgttgactcttaccctctttgaagatcgggaaatgattgaggaaagactaaaaacatacgctcacctgttcgacgataaggttatgaaacagttaaagaggcgtcgctatacgggctggggacgattgtcgcggaaacttatcaacgggataagagacaagcaaagtggtaaaactattctcgattttctaaagagcgacggcttcgccaataggaactttatgcagctgatccatgatgactctttaaccttcaaagaggatatacaaaaggcacaggtttccggacaaggggactcattgcacgaacatattgcgaatcttgctggttcgccagccatcaaaaagggcatactccagacagtcaaagtagtggatgagctagttaaggtcatgggacgtcacaaaccggaaaacattgtaatcgagatggcacgcgaaaatcaaacgactcagaaggggcaaaaaaacagtcgagagcggatgaagagaatagaagagggtattaaagaactgggcagccagatcttaaaggagcatcctgtggaaaatacccaattgcagaacgagaaactttacctctattacctacaaaatggaagggacatgtatgttgatcaggaactggacataaaccgtttatctgattacgacgtcgatgccattgtaccccaatcctttttgaaggacgattcaatcgacaataaagtgcttacacgctcggataagaaccgagggaaaagtgacaatgttccaagcgaggaagtcgtaaagaaaatgaagaactattggcggcagctcctaaatgcgaaactgataacgcaaagaaagttcgataacttaactaaagctgagaggggtggcttgtctgaacttgacaaggccggatttattaaacgtcagctcgtggaaacccgccaaatcacaaagcatgttgcacagatactagattcccgaatgaatacgaaatacgacgagaacgataagctgattcgggaagtcaaagtaatcactttaaagtcaaaattggtgtcggacttcagaaaggattttcaattctataaagttagggagataaataactaccaccatgcgcacgacgcttatcttaatgccgtcgtagggaccgcactcattaagaaatacccgaagctagaaagtgagtttgtgtatggtgattacaaagtttatgacgtccgtaagatgatcgcgaaaagcgaacaggagataggcaaggctacagccaaatacttcttttattctaacattatgaatttctttaagacggaaatcactctggcaaacggagagatacgcaaacgacctttaattgaaaccaatggggagacaggtgaaatcgtatgggataagggccgggacttcgcgacggtgagaaaagttttgtccatgccccaagtcaacatagtaaagaaaactgaggtgcagaccggagggttttcaaaggaatcgattcttccaaaaaggaatagtgataagctcatcgctcgtaaaaaggactgggacccgaaaaagtacggtggcttcgatagccctacagttgcctattctgtcctagtagtggcaaaagttgagaagggaaaatccaagaaactgaagtcagtcaaagaattattggggataacgattatggagcgctcgtcttttgaaaagaaccccatcgacttccttgaggcgaaaggttacaaggaagtaaaaaaggatctcataattaaactaccaaagtatagtctgtttgagttagaaaatggccgaaaacggatgttggctagcgccggagagcttcaaaaggggaacgaactcgcactaccgtctaaatacgtgaatttcctgtatttagcgtcccattacgagaagttgaaaggttcacctgaagataacgaacagaagcaactttttgttgagcagcacaaacattatctcgacgaaatcatagagcaaatttcggaattcagtaagagagtcatcctagctgatgccaatctggacaaagtattaagcgcatacaacaagcacagggataaacccatacgtgagcaggcggaaaatattatccatttgtttactcttaccaacctcggcgctccagccgcattcaagtattttgacacaacgatagatcgcaaacgatacacttctaccaaggaggtgctagacgcgacactgattcaccaatccatcacgggattatatgaaactcggatagatttgtcacagcttgggggtgacaactcaaagaaaaggtcactggaggacaacgaaacggaaatcaaagtctccagagacacctggaacactaagaacatgcggtccctggaaccgccacgaagcaagaaacggatacat

SEQ ID NO: 184 - DNA, 5181 bp, Artificial Sequence
  chemically synthesized
atgcccaaaaagaagaggaaagtcagctctttgccactggaaacacctgagcaatggcacaagctgacccattgtaacagccgagcacttagtcgatggccgaatccgaggatttccgcttgggacccacgatctccggccaccctgtgcgaaacgtgtcagaaactcaatccaacagggggcgggaaaatgagaacgatccagcgagggtgggctcctaaccacatctggcaggctgacatcacgcattacaagtataaacagtttacatacgcactgcatgtgttcgtcgatacgtattcaggtgctacacacgcttctgctaagcgcggtctcacaacacagatgacgattgaaggccttcttgaggctattgtccacttgggaaggccgaaaaagttgaacaccgatcaaggtgcaaactatacgagcaagactttcgttcggttttgccaacagtttggggtatctcttagtcatcacgtaccctataatcccaccagttccggcttggtggaacgaacgaacggtctgctgaaactgttgctgtccaaatatcacttggatgagccacatttgccgatgactcaggccctctcccgcgctctctggacacacaaccagataaaccttctcccgatacttaagactcgctgggaacttcaccattcacctccattggcagttattagtgaaggtggtgagactcctaaaggtagtgacaaacttttcttgtacaagttgcccggccaaaataaccggaggtggctcgggccgttgccagcgcttgtcgaagcgtctggcggggccctgcttgcgaccgacccccctgtctgggtgccatggcggctcttgaaggcgttcaagtgcctgaaaaatgacggaccagaagacgcgcataatagaagctcagatggtgggggcgggggaagcggcggtggaggtagtggagggggaggatcagataaaaagtattctattggtttagccatcggcactaattccgttggatgggctgtcataaccgatgaatacaaagtaccttcaaagaaatttaaggtgttggggaacacagaccgtcattcgattaaaaagaatcttatcggtgccctcctattcgatagtggcgaaacggcagaggcgactcgcctgaaacgaaccgctcggagaaggtatacacgtcgcaagaaccgaatatgttacttacaagaaatttttagcaatgagatggccaaagttgacgattctttctttcaccgtttggaagagtccttccttgtcgaagaggacaagaaacatgaacggcaccccatctttggaaacatagtagatgaggtggcatatcatgaaaagtacccaacgatttatcacctcagaaaaaagctagttgactcaactgataaagcggacctgaggttaatctacttggctcttgcccatatgataaagttccgtgggcactttctcattgagggtgatctaaatccggacaactcggatgtcgacaaactgttcatccagttagtacaaacctataatcagttgtttgaagagaaccctataaatgcaagtggcgtggatgcgaaggctattcttagcgcccgcctctctaaatcccgacggctagaaaacctgatcgcacaattacccggagagaagaaaaatgggttgttcggtaaccttatagcgctctcactaggcctgacaccaaattttaagtcgaacttcgacttagctgaagatgccaaattgcagcttagtaaggacacgtacgatgacgatctcgacaatctactggcacaaattggagatcagtatgcggacttatttttggctgccaaaaaccttagcgatgcaatcctcctatctgacatactgagagttaatactgagattaccaaggcgccgttatccgcttcaatgatcaaaaggtacgatgaacatcaccaagacttgacacttctcaaggccctagtccgtcagcaactgcctgagaaatataaggaaatattctttgatcagtcgaaaaacgggtacgcaggttatattgacggcggagcgagtcaagaggaattctacaagtttatcaaacccatattagagaagatggatgggacggaagagttgcttgtaaaactcaatcgcgaagatctactgcgaaagcagcggactttcgacaacggtagcattccacatcaaatccacttaggcgaattgcatgctatacttagaaggcaggaggatttttatccgttcctcaaagacaatcgtgaaaagattgagaaaatcctaacctttcgcataccttactatgtgggacccctggcccgagggaactctcggttcgcatggatgacaagaaagtccgaagaaacgattactccatggaattttgaggaagttgtcgataaaggtgcgtcagctcaatcgttcatcgagaggatgaccaactttgacaagaatttaccgaacgaaaaagtattgcctaagcacagtttactttacgagtatttcacagtgtacaatgaactcacgaaagttaagtatgtcactgagggcatgcgtaaacccgcctttctaagcggagaacagaagaaagcaatagtagatctgttattcaagaccaaccgcaaagtgacagttaagcaattgaaagaggactactttaagaaaattgaatgcttcgattctgtcgagatctccggggtagaagatcgatttaatgcgtcacttggtacgtatcatgacctcctaaagataattaaagataaggacttcctggataacgaagagaatgaagatatcttagaagatatagtgttgactcttaccctctttgaagatcgggaaatgattgaggaaagactaaaaacatacgctcacctgttcgacgataaggttatgaaacagttaaagaggcgtcgctatacgggctggggacgattgtcgcggaaacttatcaacgggataagagacaagcaaagtggtaaaactattctcgattttctaaagagcgacggcttcgccaataggaactttatgcagctgatccatgatgactctttaaccttcaaagaggatatacaaaaggcacaggtttccggacaaggggactcattgcacgaacatattgcgaatcttgctggttcgccagccatcaaaaagggcatactccagacagtcaaagtagtggatgagctagttaaggtcatgggacgtcacaaaccggaaaacattgtaatcgagatggcacgcgaaaatcaaacgactcagaaggggcaaaaaaacagtcgagagcggatgaagagaatagaagagggtattaaagaactgggcagccagatcttaaaggagcatcctgtggaaaatacccaattgcagaacgagaaactttacctctattacctacaaaatggaagggacatgtatgttgatcaggaactggacataaaccgtttatctgattacgacgtcgatgccattgtaccccaatcctttttgaaggacgattcaatcgacaataaagtgcttacacgctcggataagaaccgagggaaaagtgacaatgttccaagcgaggaagtcgtaaagaaaatgaagaactattggcggcagctcctaaatgcgaaactgataacgcaaagaaagttcgataacttaactaaagctgagaggggtggcttgtctgaacttgacaaggccggatttattaaacgtcagctcgtggaaacccgccaaatcacaaagcatgttgcacagatactagattcccgaatgaatacgaaatacgacgagaacgataagctgattcgggaagtcaaagtaatcactttaaagtcaaaattggtgtcggacttcagaaaggattttcaattctataaagttagggagataaataactaccaccatgcgcacgacgcttatcttaatgccgtcgtagggaccgcactcattaagaaatacccgaagctagaaagtgagtttgtgtatggtgattacaaagtttatgacgtccgtaagatgatcgcgaaaagcgaacaggagataggcaaggctacagccaaatacttcttttattctaacattatgaatttctttaagacggaaatcactctggcaaacggagagatacgcaaacgacctttaattgaaaccaatggggagacaggtgaaatcgtatgggataagggccgggacttcgcgacggtgagaaaagttttgtccatgccccaagtcaacatagtaaagaaaactgaggtgcagaccggagggttttcaaaggaatcgattcttccaaaaaggaatagtgataagctcatcgctcgtaaaaaggactgggacccgaaaaagtacggtggcttcgatagccctacagttgcctattctgtcctagtagtggcaaaagttgagaagggaaaatccaagaaactgaagtcagtcaaagaattattggggataacgattatggagcgctcgtcttttgaaaagaaccccatcgacttccttgaggcgaaaggttacaaggaagtaaaaaaggatctcataattaaactaccaaagtatagtctgtttgagttagaaaatggccgaaaacggatgttggctagcgccggagagcttcaaaaggggaacgaactcgcactaccgtctaaatacgtgaatttcctgtatttagcgtcccattacgagaagttgaaaggttcacctgaagataacgaacagaagcaactttttgttgagcagcacaaacattatctcgacgaaatcatagagcaaatttcggaattcagtaagagagtcatcctagctgatgccaatctggacaaagtattaagcgcatacaacaagcacagggataaacccatacgtgagcaggcggaaaatattatccatttgtttactcttaccaacctcggcgctccagccgcattcaagtattttgacacaacgatagatcgcaaacgatacacttctaccaaggaggtgctagacgcgacactgattcaccaatccatcacgggattatatgaaactcggatagatttgtcacagcttgggggtgacaactcaaagaaaaggtcactggaggacaacgaaacggaaatcaaagtctccagagacacctggaacactaagaacatgcggtccctggaaccgccacgaagcaagaaacggatacat

SEQ ID NO: 185 - DNA, 4974 bp, Artificial Sequence
  chemically synthesized
atgcccaaaaagaagaggaaagtcagctctttgccactggaaacacctgagcaatggcacaagctgacccattgtaacagccgagcacttagtcgatggccgaatccgaggatttccgcttgggacccacgatctccggccaccctgtgcgaaacgtgtcagaaactcaatccaacagggggcgggaaaatgagaacgatccagcgagggtgggctcctaaccacatctggcaggctgacatcacgcattacaagtataaacagtttacatacgcactgcatgtgttcgtcgatacgtattcaggtgctacacacgcttctgctaagcgcggtctcacaacacagatgacgattgaaggccttcttgaggctattgtccacttgggaaggccgaaaaagttgaacaccgatcaaggtgcaaactatacgagcaagactttcgttcggttttgccaacagtttggggtatctcttagtcatcacgtaccctataatcccaccagttccggcttggtggaacgaacgaacggtctgctgaaactgttgctgtccaaatatcacttggatgagccacatttgccgatgactcaggccctctcccgcgctctctggacacacaaccagataaaccttctcccgatacttaagactcgctgggaacttcaccattcacctccattggcagttattagtgaaggtggtgagactcctgggggcgggggaagcggcggtggaggtagtggagggggaggatcagataaaaagtattctattggtttagccatcggcactaattccgttggatgggctgtcataaccgatgaatacaaagtaccttcaaagaaatttaaggtgttggggaacacagaccgtcattcgattaaaaagaatcttatcggtgccctcctattcgatagtggcgaaacggcagaggcgactcgcctgaaacgaaccgctcggagaaggtatacacgtcgcaagaaccgaatatgttacttacaagaaatttttagcaatgagatggccaaagttgacgattctttctttcaccgtttggaagagtccttccttgtcgaagaggacaagaaacatgaacggcaccccatctttggaaacatagtagatgaggtggcatatcatgaaaagtacccaacgatttatcacctcagaaaaaagctagttgactcaactgataaagcggacctgaggttaatctacttggctcttgcccatatgataaagttccgtgggcactttctcattgagggtgatctaaatccggacaactcggatgtcgacaaactgttcatccagttagtacaaacctataatcagttgtttgaagagaaccctataaatgcaagtggcgtggatgcgaaggctattcttagcgcccgcctctctaaatcccgacggctagaaaacctgatcgcacaattacccggagagaagaaaaatgggttgttcggtaaccttatagcgctctcactaggcctgacaccaaattttaagtcgaacttcgacttagctgaagatgccaaattgcagcttagtaaggacacgtacgatgacgatctcgacaatctactggcacaaattggagatcagtatgcggacttatttttggctgccaaaaaccttagcgatgcaatcctcctatctgacatactgagagttaatactgagattaccaaggcgccgttatccgcttcaatgatcaaaaggtacgatgaacatcaccaagacttgacacttctcaaggccctagtccgtcagcaactgcctgagaaatataaggaaatattctttgatcagtcgaaaaacgggtacgcaggttatattgacggcggagcgagtcaagaggaattctacaagtttatcaaacccatattagagaagatggatgggacggaagagttgcttgtaaaactcaatcgcgaagatctactgcgaaagcagcggactttcgacaacggtagcattccacatcaaatccacttaggcgaattgcatgctatacttagaaggcaggaggatttttatccgttcctcaaagacaatcgtgaaaagattgagaaaatcctaacctttcgcataccttactatgtgggacccctggcccgagggaactctcggttcgcatggatgacaagaaagtccgaagaaacgattactccatggaattttgaggaagttgtcgataaaggtgcgtcagctcaatcgttcatcgagaggatgaccaactttgacaagaatttaccgaacgaaaaagtattgcctaagcacagtttactttacgagtatttcacagtgtacaatgaactcacgaaagttaagtatgtcactgagggcatgcgtaaacccgcctttctaagcggagaacagaagaaagcaatagtagatctgttattcaagaccaaccgcaaagtgacagttaagcaattgaaagaggactactttaagaaaattgaatgcttcgattctgtcgagatctccggggtagaagatcgatttaatgcgtcacttggtacgtatcatgacctcctaaagataattaaagataaggacttcctggataacgaagagaatgaagatatcttagaagatatagtgttgactcttaccctctttgaagatcgggaaatgattgaggaaagactaaaaacatacgctcacctgttcgacgataaggttatgaaacagttaaagaggcgtcgctatacgggctggggacgattgtcgcggaaacttatcaacgggataagagacaagcaaagtggtaaaactattctcgattttctaaagagcgacggcttcgccaataggaactttatgcagctgatccatgatgactctttaaccttcaaagaggatatacaaaaggcacaggtttccggacaaggggactcattgcacgaacatattgcgaatcttgctggttcgccagccatcaaaaagggcatactccagacagtcaaagtagtggatgagctagttaaggtcatgggacgtcacaaaccggaaaacattgtaatcgagatggcacgcgaaaatcaaacgactcagaaggggcaaaaaaacagtcgagagcggatgaagagaatagaagagggtattaaagaactgggcagccagatcttaaaggagcatcctgtggaaaatacccaattgcagaacgagaaactttacctctattacctacaaaatggaagggacatgtatgttgatcaggaactggacataaaccgtttatctgattacgacgtcgatgccattgtaccccaatcctttttgaaggacgattcaatcgacaataaagtgcttacacgctcggataagaaccgagggaaaagtgacaatgttccaagcgaggaagtcgtaaagaaaatgaagaactattggcggcagctcctaaatgcgaaactgataacgcaaagaaagttcgataacttaactaaagctgagaggggtggcttgtctgaacttgacaaggccggatttattaaacgtcagctcgtggaaacccgccaaatcacaaagcatgttgcacagatactagattcccgaatgaatacgaaatacgacgagaacgataagctgattcgggaagtcaaagtaatcactttaaagtcaaaattggtgtcggacttcagaaaggattttcaattctataaagttagggagataaataactaccaccatgcgcacgacgcttatcttaatgccgtcgtagggaccgcactcattaagaaatacccgaagctagaaagtgagtttgtgtatggtgattacaaagtttatgacgtccgtaagatgatcgcgaaaagcgaacaggagataggcaaggctacagccaaatacttcttttattctaacattatgaatttctttaagacggaaatcactctggcaaacggagagatacgcaaacgacctttaattgaaaccaatggggagacaggtgaaatcgtatgggataagggccgggacttcgcgacggtgagaaaagttttgtccatgccccaagtcaacatagtaaagaaaactgaggtgcagaccggagggttttcaaaggaatcgattcttccaaaaaggaatagtgataagctcatcgctcgtaaaaaggactgggacccgaaaaagtacggtggcttcgatagccctacagttgcctattctgtcctagtagtggcaaaagttgagaagggaaaatccaagaaactgaagtcagtcaaagaattattggggataacgattatggagcgctcgtcttttgaaaagaaccccatcgacttccttgaggcgaaaggttacaaggaagtaaaaaaggatctcataattaaactaccaaagtatagtctgtttgagttagaaaatggccgaaaacggatgttggctagcgccggagagcttcaaaaggggaacgaactcgcactaccgtctaaatacgtgaatttcctgtatttagcgtcccattacgagaagttgaaaggttcacctgaagataacgaacagaagcaactttttgttgagcagcacaaacattatctcgacgaaatcatagagcaaatttcggaattcagtaagagagtcatcctagctgatgccaatctggacaaagtattaagcgcatacaacaagcacagggataaacccatacgtgagcaggcggaaaatattatccatttgtttactcttaccaacctcggcgctccagccgcattcaagtattttgacacaacgatagatcgcaaacgatacacttctaccaaggaggtgctagacgcgacactgattcaccaatccatcacgggattatatgaaactcggatagatttgtcacagcttgggggtgacaactcaaagaaaaggtcactggaggacaacgaaacggaaatcaaagtctccagagacacctggaacactaagaacatgcggtccctggaaccgccacgaagcaagaaacggatacat

SEQ ID NO: 186 - DNA, 5172 bp, Artificial Sequence
  chemically synthesized
atgcccaaaaagaagaggaaagtcagctctttcctggagaaaattgagcctgcgcaagaagagcacgacaaatatcacagtaatgtaaaggagttggttttcaaatttggacttccacggattgtagctcgccagatagttgatacctgtgataaatgtcaccaaaagggtgaagctattcacggtcaggcgaactctgacttgggcacgtggcagatggactgcactcacttggaaggtaaaatcattatcgttgcggttcatgtagccagtggattcatcgaagcagaagtcattcctcaggaaacaggaagacagacagcactgttcctcctcaagctcgcaggtaggtggcccatcacgcatcttcataccgataatggcgcaaactttgcaagccaggaggtgaaaatggtagcttggtgggctggtatagaacacacgtttggtgtcccgtacaaccctcaaagtcaaggcgttgtggaggccatgaaccatcacttgaagaaccaaatcgaccgcataagagagcaggccaactccgtagaaacgatcgtactcatggcggtacactgcatgaacttcaagcgacgaggaggcatcggggatatgacgcccgcggagcggctcatcaatatgataacaaccgaacaggagattcagttccaacagtccaaaaactcaaaatttaagaattttagagtgtattaccgggaaggtagagaccagttgtggaagggtcctggtgaattgttgtggaagggtgaaggtgcggtaatcctgaaggtaggtaccgacatcaaggtcgttcccagaaggaaggctaagatcatcaaggattatgggggtgggaaagaagtggattcctctagtcacatggaagataccggcgaggctagggaggttgcggggggcgggggaagcggcggtggaggtagtggagggggaggatcagataaaaagtattctattggtttagccatcggcactaattccgttggatgggctgtcataaccgatgaatacaaagtaccttcaaagaaatttaaggtgttggggaacacagaccgtcattcgattaaaaagaatcttatcggtgccctcctattcgatagtggcgaaacggcagaggcgactcgcctgaaacgaaccgctcggagaaggtatacacgtcgcaagaaccgaatatgttacttacaagaaatttttagcaatgagatggccaaagttgacgattctttctttcaccgtttggaagagtccttccttgtcgaagaggacaagaaacatgaacggcaccccatctttggaaacatagtagatgaggtggcatatcatgaaaagtacccaacgatttatcacctcagaaaaaagctagttgactcaactgataaagcggacctgaggttaatctacttggctcttgcccatatgataaagttccgtgggcactttctcattgagggtgatctaaatccggacaactcggatgtcgacaaactgttcatccagttagtacaaacctataatcagttgtttgaagagaaccctataaatgcaagtggcgtggatgcgaaggctattcttagcgcccgcctctctaaatcccgacggctagaaaacctgatcgcacaattacccggagagaagaaaaatgggttgttcggtaaccttatagcgctctcactaggcctgacaccaaattttaagtcgaacttcgacttagctgaagatgccaaattgcagcttagtaaggacacgtacgatgacgatctcgacaatctactggcacaaattggagatcagtatgcggacttatttttggctgccaaaaaccttagcgatgcaatcctcctatctgacatactgagagttaatactgagattaccaaggcgccgttatccgcttcaatgatcaaaaggtacgatgaacatcaccaagacttgacacttctcaaggccctagtccgtcagcaactgcctgagaaatataaggaaatattctttgatcagtcgaaaaacgggtacgcaggttatattgacggcggagcgagtcaagaggaattctacaagtttatcaaacccatattagagaagatggatgggacggaagagttgcttgtaaaactcaatcgcgaagatctactgcgaaagcagcggactttcgacaacggtagcattccacatcaaatccacttaggcgaattgcatgctatacttagaaggcaggaggatttttatccgttcctcaaagacaatcgtgaaaagattgagaaaatcctaacctttcgcataccttactatgtgggacccctggcccgagggaactctcggttcgcatggatgacaagaaagtccgaagaaacgattactccatggaattttgaggaagttgtcgataaaggtgcgtcagctcaatcgttcatcgagaggatgaccaactttgacaagaatttaccgaacgaaaaagtattgcctaagcacagtttactttacgagtatttcacagtgtacaatgaactcacgaaagttaagtatgtcactgagggcatgcgtaaacccgcctttctaagcggagaacagaagaaagcaatagtagatctgttattcaagaccaaccgcaaagtgacagttaagcaattgaaagaggactactttaagaaaattgaatgcttcgattctgtcgagatctccggggtagaagatcgatttaatgcgtcacttggtacgtatcatgacctcctaaagataattaaagataaggacttcctggataacgaagagaatgaagatatcttagaagatatagtgttgactcttaccctctttgaagatcgggaaatgattgaggaaagactaaaaacatacgctcacctgttcgacgataaggttatgaaacagttaaagaggcgtcgctatacgggctggggacgattgtcgcggaaacttatcaacgggataagagacaagcaaagtggtaaaactattctcgattttctaaagagcgacggcttcgccaataggaactttatgcagctgatccatgatgactctttaaccttcaaagaggatatacaaaaggcacaggtttccggacaaggggactcattgcacgaacatattgcgaatcttgctggttcgccagccatcaaaaagggcatactccagacagtcaaagtagtggatgagctagttaaggtcatgggacgtcacaaaccggaaaacattgtaatcgagatggcacgcgaaaatcaaacgactcagaaggggcaaaaaaacagtcgagagcggatgaagagaatagaagagggtattaaagaactgggcagccagatcttaaaggagcatcctgtggaaaatacccaattgcagaacgagaaactttacctctattacctacaaaatggaagggacatgtatgttgatcaggaactggacataaaccgtttatctgattacgacgtcgatgccattgtaccccaatcctttttgaaggacgattcaatcgacaataaagtgcttacacgctcggataagaaccgagggaaaagtgacaatgttccaagcgaggaagtcgtaaagaaaatgaagaactattggcggcagctcctaaatgcgaaactgataacgcaaagaaagttcgataacttaactaaagctgagaggggtggcttgtctgaacttgacaaggccggatttattaaacgtcagctcgtggaaacccgccaaatcacaaagcatgttgcacagatactagattcccgaatgaatacgaaatacgacgagaacgataagctgattcgggaagtcaaagtaatcactttaaagtcaaaattggtgtcggacttcagaaaggattttcaattctataaagttagggagataaataactaccaccatgcgcacgacgcttatcttaatgccgtcgtagggaccgcactcattaagaaatacccgaagctagaaagtgagtttgtgtatggtgattacaaagtttatgacgtccgtaagatgatcgcgaaaagcgaacaggagataggcaaggctacagccaaatacttcttttattctaacattatgaatttctttaagacggaaatcactctggcaaacggagagatacgcaaacgacctttaattgaaaccaatggggagacaggtgaaatcgtatgggataagggccgggacttcgcgacggtgagaaaagttttgtccatgccccaagtcaacatagtaaagaaaactgaggtgcagaccggagggttttcaaaggaatcgattcttccaaaaaggaatagtgataagctcatcgctcgtaaaaaggactgggacccgaaaaagtacggtggcttcgatagccctacagttgcctattctgtcctagtagtggcaaaagttgagaagggaaaatccaagaaactgaagtcagtcaaagaattattggggataacgattatggagcgctcgtcttttgaaaagaaccccatcgacttccttgaggcgaaaggttacaaggaagtaaaaaaggatctcataattaaactaccaaagtatagtctgtttgagttagaaaatggccgaaaacggatgttggctagcgccggagagcttcaaaaggggaacgaactcgcactaccgtctaaatacgtgaatttcctgtatttagcgtcccattacgagaagttgaaaggttcacctgaagataacgaacagaagcaactttttgttgagcagcacaaacattatctcgacgaaatcatagagcaaatttcggaattcagtaagagagtcatcctagctgatgccaatctggacaaagtattaagcgcatacaacaagcacagggataaacccatacgtgagcaggcggaaaatattatccatttgtttactcttaccaacctcggcgctccagccgcattcaagtattttgacacaacgatagatcgcaaacgatacacttctaccaaggaggtgctagacgcgacactgattcaccaatccatcacgggattatatgaaactcggatagatttgtcacagcttgggggtgacaactcaaagaaaaggtcactggaggacaacgaaacggaaatcaaagtctccagagacacctggaacactaagaacatgcggtccctggaaccgccacgaagcaagaaacggatacat

SEQ ID NO: 187 - DNA, 4959 bp, Artificial Sequence
  chemically synthesized
atgcccaaaaagaagaggaaagtcagctctttcctggagaaaattgagcctgcgcaagaagagcacgacaaatatcacagtaatgtaaaggagttggttttcaaatttggacttccacggattgtagctcgccagatagttgatacctgtgataaatgtcaccaaaagggtgaagctattcacggtcaggcgaactctgacttgggcacgtggcagatggactgcactcacttggaaggtaaaatcattatcgttgcggttcatgtagccagtggattcatcgaagcagaagtcattcctcaggaaacaggaagacagacagcactgttcctcctcaagctcgcaggtaggtggcccatcacgcatcttcataccgataatggcgcaaactttgcaagccaggaggtgaaaatggtagcttggtgggctggtatagaacacacgtttggtgtcccgtacaaccctcaaagtcaaggcgttgtggaggccatgaaccatcacttgaagaaccaaatcgaccgcataagagagcaggccaactccgtagaaacgatcgtactcatggcggtacactgcatgaacttcaagcgacgaggaggcatcggggatatgacgcccgcggagcggctcatcaatatgataacaaccgaacaggagattcagttccaacagtccaaaaactcaaaatttaagaatgggggcgggggaagcggcggtggaggtagtggagggggaggatcagataaaaagtattctattggtttagccatcggcactaattccgttggatgggctgtcataaccgatgaatacaaagtaccttcaaagaaatttaaggtgttggggaacacagaccgtcattcgattaaaaagaatcttatcggtgccctcctattcgatagtggcgaaacggcagaggcgactcgcctgaaacgaaccgctcggagaaggtatacacgtcgcaagaaccgaatatgttacttacaagaaatttttagcaatgagatggccaaagttgacgattctttctttcaccgtttggaagagtccttccttgtcgaagaggacaagaaacatgaacggcaccccatctttggaaacatagtagatgaggtggcatatcatgaaaagtacccaacgatttatcacctcagaaaaaagctagttgactcaactgataaagcggacctgaggttaatctacttggctcttgcccatatgataaagttccgtgggcactttctcattgagggtgatctaaatccggacaactcggatgtcgacaaactgttcatccagttagtacaaacctataatcagttgtttgaagagaaccctataaatgcaagtggcgtggatgcgaaggctattcttagcgcccgcctctctaaatcccgacggctagaaaacctgatcgcacaattacccggagagaagaaaaatgggttgttcggtaaccttatagcgctctcactaggcctgacaccaaattttaagtcgaacttcgacttagctgaagatgccaaattgcagcttagtaaggacacgtacgatgacgatctcgacaatctactggcacaaattggagatcagtatgcggacttatttttggctgccaaaaaccttagcgatgcaatcctcctatctgacatactgagagttaatactgagattaccaaggcgccgttatccgcttcaatgatcaaaaggtacgatgaacatcaccaagacttgacacttctcaaggccctagtccgtcagcaactgcctgagaaatataaggaaatattctttgatcagtcgaaaaacgggtacgcaggttatattgacggcggagcgagtcaagaggaattctacaagtttatcaaacccatattagagaagatggatgggacggaagagttgcttgtaaaactcaatcgcgaagatctactgcgaaagcagcggactttcgacaacggtagcattccacatcaaatccacttaggcgaattgcatgctatacttagaaggcaggaggatttttatccgttcctcaaagacaatcgtgaaaagattgagaaaatcctaacctttcgcataccttactatgtgggacccctggcccgagggaactctcggttcgcatggatgacaagaaagtccgaagaaacgattactccatggaattttgaggaagttgtcgataaaggtgcgtcagctcaatcgttcatcgagaggatgaccaactttgacaagaatttaccgaacgaaaaagtattgcctaagcacagtttactttacgagtatttcacagtgtacaatgaactcacgaaagttaagtatgtcactgagggcatgcgtaaacccgcctttctaagcggagaacagaagaaagcaatagtagatctgttattcaagaccaaccgcaaagtgacagttaagcaattgaaagaggactactttaagaaaattgaatgcttcgattctgtcgagatctccggggtagaagatcgatttaatgcgtcacttggtacgtatcatgacctcctaaagataattaaagataaggacttcctggataacgaagagaatgaagatatcttagaagatatagtgttgactcttaccctctttgaagatcgggaaatgattgaggaaagactaaaaacatacgctcacctgttcgacgataaggttatgaaacagttaaagaggcgtcgctatacgggctggggacgattgtcgcggaaacttatcaacgggataagagacaagcaaagtggtaaaactattctcgattttctaaagagcgacggcttcgccaataggaactttatgcagctgatccatgatgactctttaaccttcaaagaggatatacaaaaggcacaggtttccggacaaggggactcattgcacgaacatattgcgaatcttgctggttcgccagccatcaaaaagggcatactccagacagtcaaagtagtggatgagctagttaaggtcatgggacgtcacaaaccggaaaacattgtaatcgagatggcacgcgaaaatcaaacgactcagaaggggcaaaaaaacagtcgagagcggatgaagagaatagaagagggtattaaagaactgggcagccagatcttaaaggagcatcctgtggaaaatacccaattgcagaacgagaaactttacctctattacctacaaaatggaagggacatgtatgttgatcaggaactggacataaaccgtttatctgattacgacgtcgatgccattgtaccccaatcctttttgaaggacgattcaatcgacaataaagtgcttacacgctcggataagaaccgagggaaaagtgacaatgttccaagcgaggaagtcgtaaagaaaatgaagaactattggcggcagctcctaaatgcgaaactgataacgcaaagaaagttcgataacttaactaaagctgagaggggtggcttgtctgaacttgacaaggccggatttattaaacgtcagctcgtggaaacccgccaaatcacaaagcatgttgcacagatactagattcccgaatgaatacgaaatacgacgagaacgataagctgattcgggaagtcaaagtaatcactttaaagtcaaaattggtgtcggacttcagaaaggattttcaattctataaagttagggagataaataactaccaccatgcgcacgacgcttatcttaatgccgtcgtagggaccgcactcattaagaaatacccgaagctagaaagtgagtttgtgtatggtgattacaaagtttatgacgtccgtaagatgatcgcgaaaagcgaacaggagataggcaaggctacagccaaatacttcttttattctaacattatgaatttctttaagacggaaatcactctggcaaacggagagatacgcaaacgacctttaattgaaaccaatggggagacaggtgaaatcgtatgggataagggccgggacttcgcgacggtgagaaaagttttgtccatgccccaagtcaacatagtaaagaaaactgaggtgcagaccggagggttttcaaaggaatcgattcttccaaaaaggaatagtgataagctcatcgctcgtaaaaaggactgggacccgaaaaagtacggtggcttcgatagccctacagttgcctattctgtcctagtagtggcaaaagttgagaagggaaaatccaagaaactgaagtcagtcaaagaattattggggataacgattatggagcgctcgtcttttgaaaagaaccccatcgacttccttgaggcgaaaggttacaaggaagtaaaaaaggatctcataattaaactaccaaagtatagtctgtttgagttagaaaatggccgaaaacggatgttggctagcgccggagagcttcaaaaggggaacgaactcgcactaccgtctaaatacgtgaatttcctgtatttagcgtcccattacgagaagttgaaaggttcacctgaagataacgaacagaagcaactttttgttgagcagcacaaacattatctcgacgaaatcatagagcaaatttcggaattcagtaagagagtcatcctagctgatgccaatctggacaaagtattaagcgcatacaacaagcacagggataaacccatacgtgagcaggcggaaaatattatccatttgtttactcttaccaacctcggcgctccagccgcattcaagtattttgacacaacgatagatcgcaaacgatacacttctaccaaggaggtgctagacgcgacactgattcaccaatccatcacgggattatatgaaactcggatagatttgtcacagcttgggggtgacaactcaaagaaaaggtcactggaggacaacgaaacggaaatcaaagtctccagagacacctggaacactaagaacatgcggtccctggaaccgccacgaagcaagaaacggatacat

SEQ ID NO: 188 - DNA, 5136 bp, Artificial Sequence
  chemically synthesized
atgcccaaaaagaagaggaaagtcagctctagttcttgggtagaccgaatagaggaggctgagattaaccacgaaaaattccacagcgaccctcagtatcttcgaaccgaatttaatttgcccaagatggtcgctgaagaaatccgacgaaagtgccctgtatgccgcatccggggcgaacaggtgggcggccagttgaagataggtcctggtatctggcagatggactgcacgcacttcgatggcaagatcatcctggtagggatacacgtagagtcaggttatatctgggcgcagattattagtcaggaaacggctgactgcactgtaaaggctgtccttcaacttttgagcgcccacaatgtcaccgaactccaaacagacaatggacctaattttaagaatcagaaaatggagggggtattgaactatatgggggtaaaacataaattcggtattccagggaacccgcaatctcaggcgctggtggagaacgttaatcatacccttaaggtgtggattcggaagttcctgccagaaactactagcctggataacgccctgtcattggctgttcactcacttaattttaaacggaggggcagaataggcggaatggccccctacgaattgttggctcaacaagagagtcttaggatacaagattacttctcagcaataccccaaaaattgcaagcacagtggatttattacaaagatcagaaagataagaaatggaagggaccgatgcgagttgagtattgggggcaagggtctgttctccttaaggatgaagagaagggttacttcttgataccccggcggcatatacgacgggtgcccgaaccttgcgcactgcccgagggtgatgaagggggcgggggaagcggcggtggaggtagtggagggggaggatcagataaaaagtattctattggtttagccatcggcactaattccgttggatgggctgtcataaccgatgaatacaaagtaccttcaaagaaatttaaggtgttggggaacacagaccgtcattcgattaaaaagaatcttatcggtgccctcctattcgatagtggcgaaacggcagaggcgactcgcctgaaacgaaccgctcggagaaggtatacacgtcgcaagaaccgaatatgttacttacaagaaatttttagcaatgagatggccaaagttgacgattctttctttcaccgtttggaagagtccttccttgtcgaagaggacaagaaacatgaacggcaccccatctttggaaacatagtagatgaggtggcatatcatgaaaagtacccaacgatttatcacctcagaaaaaagctagttgactcaactgataaagcggacctgaggttaatctacttggctcttgcccatatgataaagttccgtgggcactttctcattgagggtgatctaaatccggacaactcggatgtcgacaaactgttcatccagttagtacaaacctataatcagttgtttgaagagaaccctataaatgcaagtggcgtggatgcgaaggctattcttagcgcccgcctctctaaatcccgacggctagaaaacctgatcgcacaattacccggagagaagaaaaatgggttgttcggtaaccttatagcgctctcactaggcctgacaccaaattttaagtcgaacttcgacttagctgaagatgccaaattgcagcttagtaaggacacgtacgatgacgatctcgacaatctactggcacaaattggagatcagtatgcggacttatttttggctgccaaaaaccttagcgatgcaatcctcctatctgacatactgagagttaatactgagattaccaaggcgccgttatccgcttcaatgatcaaaaggtacgatgaacatcaccaagacttgacacttctcaaggccctagtccgtcagcaactgcctgagaaatataaggaaatattctttgatcagtcgaaaaacgggtacgcaggttatattgacggcggagcgagtcaagaggaattctacaagtttatcaaacccatattagagaagatggatgggacggaagagttgcttgtaaaactcaatcgcgaagatctactgcgaaagcagcggactttcgacaacggtagcattccacatcaaatccacttaggcgaattgcatgctatacttagaaggcaggaggatttttatccgttcctcaaagacaatcgtgaaaagattgagaaaatcctaacctttcgcataccttactatgtgggacccctggcccgagggaactctcggttcgcatggatgacaagaaagtccgaagaaacgattactccatggaattttgaggaagttgtcgataaaggtgcgtcagctcaatcgttcatcgagaggatgaccaactttgacaagaatttaccgaacgaaaaagtattgcctaagcacagtttactttacgagtatttcacagtgtacaatgaactcacgaaagttaagtatgtcactgagggcatgcgtaaacccgcctttctaagcggagaacagaagaaagcaatagtagatctgttattcaagaccaaccgcaaagtgacagttaagcaattgaaagaggactactttaagaaaattgaatgcttcgattctgtcgagatctccggggtagaagatcgatttaatgcgtcacttggtacgtatcatgacctcctaaagataattaaagataaggacttcctggataacgaagagaatgaagatatcttagaagatatagtgttgactcttaccctctttgaagatcgggaaatgattgaggaaagactaaaaacatacgctcacctgttcgacgataaggttatgaaacagttaaagaggcgtcgctatacgggctggggacgattgtcgcggaaacttatcaacgggataagagacaagcaaagtggtaaaactattctcgattttctaaagagcgacggcttcgccaataggaactttatgcagctgatccatgatgactctttaaccttcaaagaggatatacaaaaggcacaggtttccggacaaggggactcattgcacgaacatattgcgaatcttgctggttcgccagccatcaaaaagggcatactccagacagtcaaagtagtggatgagctagttaaggtcatgggacgtcacaaaccggaaaacattgtaatcgagatggcacgcgaaaatcaaacgactcagaaggggcaaaaaaacagtcgagagcggatgaagagaatagaagagggtattaaagaactgggcagccagatcttaaaggagcatcctgtggaaaatacccaattgcagaacgagaaactttacctctattacctacaaaatggaagggacatgtatgttgatcaggaactggacataaaccgtttatctgattacgacgtcgatgccattgtaccccaatcctttttgaaggacgattcaatcgacaataaagtgcttacacgctcggataagaaccgagggaaaagtgacaatgttccaagcgaggaagtcgtaaagaaaatgaagaactattggcggcagctcctaaatgcgaaactgataacgcaaagaaagttcgataacttaactaaagctgagaggggtggcttgtctgaacttgacaaggccggatttattaaacgtcagctcgtggaaacccgccaaatcacaaagcatgttgcacagatactagattcccgaatgaatacgaaatacgacgagaacgataagctgattcgggaagtcaaagtaatcactttaaagtcaaaattggtgtcggacttcagaaaggattttcaattctataaagttagggagataaataactaccaccatgcgcacgacgcttatcttaatgccgtcgtagggaccgcactcattaagaaatacccgaagctagaaagtgagtttgtgtatggtgattacaaagtttatgacgtccgtaagatgatcgcgaaaagcgaacaggagataggcaaggctacagccaaatacttcttttattctaacattatgaatttctttaagacggaaatcactctggcaaacggagagatacgcaaacgacctttaattgaaaccaatggggagacaggtgaaatcgtatgggataagggccgggacttcgcgacggtgagaaaagttttgtccatgccccaagtcaacatagtaaagaaaactgaggtgcagaccggagggttttcaaaggaatcgattcttccaaaaaggaatagtgataagctcatcgctcgtaaaaaggactgggacccgaaaaagtacggtggcttcgatagccctacagttgcctattctgtcctagtagtggcaaaagttgagaagggaaaatccaagaaactgaagtcagtcaaagaattattggggataacgattatggagcgctcgtcttttgaaaagaaccccatcgacttccttgaggcgaaaggttacaaggaagtaaaaaaggatctcataattaaactaccaaagtatagtctgtttgagttagaaaatggccgaaaacggatgttggctagcgccggagagcttcaaaaggggaacgaactcgcactaccgtctaaatacgtgaatttcctgtatttagcgtcccattacgagaagttgaaaggttcacctgaagataacgaacagaagcaactttttgttgagcagcacaaacattatctcgacgaaatcatagagcaaatttcggaattcagtaagagagtcatcctagctgatgccaatctggacaaagtattaagcgcatacaacaagcacagggataaacccatacgtgagcaggcggaaaatattatccatttgtttactcttaccaacctcggcgctccagccgcattcaagtattttgacacaacgatagatcgcaaacgatacacttctaccaaggaggtgctagacgcgacactgattcaccaatccatcacgggattatatgaaactcggatagatttgtcacagcttgggggtgacaactcaaagaaaaggtcactggaggacaacgaaacggaaatcaaagtctccagagacacctggaacactaagaacatgcggtccctggaaccgccacgaagcaagaaacggatacat

SEQ ID NO: 189 - DNA, 4962 bp, Artificial Sequence
  chemically synthesized
atgcccaaaaagaagaggaaagtcagctctagttcttgggtagaccgaatagaggaggctgagattaaccacgaaaaattccacagcgaccctcagtatcttcgaaccgaatttaatttgcccaagatggtcgctgaagaaatccgacgaaagtgccctgtatgccgcatccggggcgaacaggtgggcggccagttgaagataggtcctggtatctggcagatggactgcacgcacttcgatggcaagatcatcctggtagggatacacgtagagtcaggttatatctgggcgcagattattagtcaggaaacggctgactgcactgtaaaggctgtccttcaacttttgagcgcccacaatgtcaccgaactccaaacagacaatggacctaattttaagaatcagaaaatggagggggtattgaactatatgggggtaaaacataaattcggtattccagggaacccgcaatctcaggcgctggtggagaacgttaatcatacccttaaggtgtggattcggaagttcctgccagaaactactagcctggataacgccctgtcattggctgttcactcacttaattttaaacggaggggcagaataggcggaatggccccctacgaattgttggctcaacaagagagtcttaggatacaagattacttctcagcaataccccaaaaattgcaagcagggggcgggggaagcggcggtggaggtagtggagggggaggatcagataaaaagtattctattggtttagccatcggcactaattccgttggatgggctgtcataaccgatgaatacaaagtaccttcaaagaaatttaaggtgttggggaacacagaccgtcattcgattaaaaagaatcttatcggtgccctcctattcgatagtggcgaaacggcagaggcgactcgcctgaaacgaaccgctcggagaaggtatacacgtcgcaagaaccgaatatgttacttacaagaaatttttagcaatgagatggccaaagttgacgattctttctttcaccgtttggaagagtccttccttgtcgaagaggacaagaaacatgaacggcaccccatctttggaaacatagtagatgaggtggcatatcatgaaaagtacccaacgatttatcacctcagaaaaaagctagttgactcaactgataaagcggacctgaggttaatctacttggctcttgcccatatgataaagttccgtgggcactttctcattgagggtgatctaaatccggacaactcggatgtcgacaaactgttcatccagttagtacaaacctataatcagttgtttgaagagaaccctataaatgcaagtggcgtggatgcgaaggctattcttagcgcccgcctctctaaatcccgacggctagaaaacctgatcgcacaattacccggagagaagaaaaatgggttgttcggtaaccttatagcgctctcactaggcctgacaccaaattttaagtcgaacttcgacttagctgaagatgccaaattgcagcttagtaaggacacgtacgatgacgatctcgacaatctactggcacaaattggagatcagtatgcggacttatttttggctgccaaaaaccttagcgatgcaatcctcctatctgacatactgagagttaatactgagattaccaaggcgccgttatccgcttcaatgatcaaaaggtacgatgaacatcaccaagacttgacacttctcaaggccctagtccgtcagcaactgcctgagaaatataaggaaatattctttgatcagtcgaaaaacgggtacgcaggttatattgacggcggagcgagtcaagaggaattctacaagtttatcaaacccatattagagaagatggatgggacggaagagttgcttgtaaaactcaatcgcgaagatctactgcgaaagcagcggactttcgacaacggtagcattccacatcaaatccacttaggcgaattgcatgctatacttagaaggcaggaggatttttatccgttcctcaaagacaatcgtgaaaagattgagaaaatcctaacctttcgcataccttactatgtgggacccctggcccgagggaactctcggttcgcatggatgacaagaaagtccgaagaaacgattactccatggaattttgaggaagttgtcgataaaggtgcgtcagctcaatcgttcatcgagaggatgaccaactttgacaagaatttaccgaacgaaaaagtattgcctaagcacagtttactttacgagtatttcacagtgtacaatgaactcacgaaagttaagtatgtcactgagggcatgcgtaaacccgcctttctaagcggagaacagaagaaagcaatagtagatctgttattcaagaccaaccgcaaagtgacagttaagcaattgaaagaggactactttaagaaaattgaatgcttcgattctgtcgagatctccggggtagaagatcgatttaatgcgtcacttggtacgtatcatgacctcctaaagataattaaagataaggacttcctggataacgaagagaatgaagatatcttagaagatatagtgttgactcttaccctctttgaagatcgggaaatgattgaggaaagactaaaaacatacgctcacctgttcgacgataaggttatgaaacagttaaagaggcgtcgctatacgggctggggacgattgtcgcggaaacttatcaacgggataagagacaagcaaagtggtaaaactattctcgattttctaaagagcgacggcttcgccaataggaactttatgcagctgatccatgatgactctttaaccttcaaagaggatatacaaaaggcacaggtttccggacaaggggactcattgcacgaacatattgcgaatcttgctggttcgccagccatcaaaaagggcatactccagacagtcaaagtagtggatgagctagttaaggtcatgggacgtcacaaaccggaaaacattgtaatcgagatggcacgcgaaaatcaaacgactcagaaggggcaaaaaaacagtcgagagcggatgaagagaatagaagagggtattaaagaactgggcagccagatcttaaaggagcatcctgtggaaaatacccaattgcagaacgagaaactttacctctattacctacaaaatggaagggacatgtatgttgatcaggaactggacataaaccgtttatctgattacgacgtcgatgccattgtaccccaatcctttttgaaggacgattcaatcgacaataaagtgcttacacgctcggataagaaccgagggaaaagtgacaatgttccaagcgaggaagtcgtaaagaaaatgaagaactattggcggcagctcctaaatgcgaaactgataacgcaaagaaagttcgataacttaactaaagctgagaggggtggcttgtctgaacttgacaaggccggatttattaaacgtcagctcgtggaaacccgccaaatcacaaagcatgttgcacagatactagattcccgaatgaatacgaaatacgacgagaacgataagctgattcgggaagtcaaagtaatcactttaaagtcaaaattggtgtcggacttcagaaaggattttcaattctataaagttagggagataaataactaccaccatgcgcacgacgcttatcttaatgccgtcgtagggaccgcactcattaagaaatacccgaagctagaaagtgagtttgtgtatggtgattacaaagtttatgacgtccgtaagatgatcgcgaaaagcgaacaggagataggcaaggctacagccaaatacttcttttattctaacattatgaatttctttaagacggaaatcactctggcaaacggagagatacgcaaacgacctttaattgaaaccaatggggagacaggtgaaatcgtatgggataagggccgggacttcgcgacggtgagaaaagttttgtccatgccccaagtcaacatagtaaagaaaactgaggtgcagaccggagggttttcaaaggaatcgattcttccaaaaaggaatagtgataagctcatcgctcgtaaaaaggactgggacccgaaaaagtacggtggcttcgatagccctacagttgcctattctgtcctagtagtggcaaaagttgagaagggaaaatccaagaaactgaagtcagtcaaagaattattggggataacgattatggagcgctcgtcttttgaaaagaaccccatcgacttccttgaggcgaaaggttacaaggaagtaaaaaaggatctcataattaaactaccaaagtatagtctgtttgagttagaaaatggccgaaaacggatgttggctagcgccggagagcttcaaaaggggaacgaactcgcactaccgtctaaatacgtgaatttcctgtatttagcgtcccattacgagaagttgaaaggttcacctgaagataacgaacagaagcaactttttgttgagcagcacaaacattatctcgacgaaatcatagagcaaatttcggaattcagtaagagagtcatcctagctgatgccaatctggacaaagtattaagcgcatacaacaagcacagggataaacccatacgtgagcaggcggaaaatattatccatttgtttactcttaccaacctcggcgctccagccgcattcaagtattttgacacaacgatagatcgcaaacgatacacttctaccaaggaggtgctagacgcgacactgattcaccaatccatcacgggattatatgaaactcggatagatttgtcacagcttgggggtgacaactcaaagaaaaggtcactggaggacaacgaaacggaaatcaaagtctccagagacacctggaacactaagaacatgcggtccctggaaccgccacgaagcaagaaacggatacat

SEQ ID NO: 190 - DNA, 5136 bp, Artificial Sequence
  chemically synthesized
atgcccaaaaagaagaggaaagtcagctctacctgctttctcgaaaacattccatctgccactgaggatcacgaaaggtggcatacttcccccgacatcttggtccgacaatttcacctccctaaaagaatagcaaaagagatcgtagcacggtgccaggaatgtaaacgcaccacaacttctccggtccggggtacgaaccccagagggcgcttcttgtggcaaatggataatactcactggaataagacgataatatgggttgcagtcgagacaaattccggtctcgtggaagcgcaagttatcccggaggagaccgcactgcaagtagccttgtgtatccttcaacttattcaacgatacacggtcttgcatctccattctgacaatgggccctgttttactgcacatagaatagaaaacttgtgtaaatacctcggtattactaagactacgggtatcccatataatcctcagtcacagggcgtagtggagcgagcgcatcgggaccttaaagacagattggcagcctatcagggagactgcgaaacagtagaagccgcgctgagtcttgcattggtgtccctgaataaaaagcgggggggcataggaggccatacaccgtatgagatttacctggagtccgagcacacaaagtaccaagatcagttggagcagcagttctcaaagcaaaagatcgaaaaatggtgctacgtgaggaacaggaggaaggagtggaagggaccgtacaaggtcttgtgggatggggatggagccgcggtcatcgaggaggagggaaaaacagcactttatccacaccgacacatgcggttcatcccaccgcccgactccgacattcaagacgggagttcagggggcgggggaagcggcggtggaggtagtggagggggaggatcagataaaaagtattctattggtttagccatcggcactaattccgttggatgggctgtcataaccgatgaatacaaagtaccttcaaagaaatttaaggtgttggggaacacagaccgtcattcgattaaaaagaatcttatcggtgccctcctattcgatagtggcgaaacggcagaggcgactcgcctgaaacgaaccgctcggagaaggtatacacgtcgcaagaaccgaatatgttacttacaagaaatttttagcaatgagatggccaaagttgacgattctttctttcaccgtttggaagagtccttccttgtcgaagaggacaagaaacatgaacggcaccccatctttggaaacatagtagatgaggtggcatatcatgaaaagtacccaacgatttatcacctcagaaaaaagctagttgactcaactgataaagcggacctgaggttaatctacttggctcttgcccatatgataaagttccgtgggcactttctcattgagggtgatctaaatccggacaactcggatgtcgacaaactgttcatccagttagtacaaacctataatcagttgtttgaagagaaccctataaatgcaagtggcgtggatgcgaaggctattcttagcgcccgcctctctaaatcccgacggctagaaaacctgatcgcacaattacccggagagaagaaaaatgggttgttcggtaaccttatagcgctctcactaggcctgacaccaaattttaagtcgaacttcgacttagctgaagatgccaaattgcagcttagtaaggacacgtacgatgacgatctcgacaatctactggcacaaattggagatcagtatgcggacttatttttggctgccaaaaaccttagcgatgcaatcctcctatctgacatactgagagttaatactgagattaccaaggcgccgttatccgcttcaatgatcaaaaggtacgatgaacatcaccaagacttgacacttctcaaggccctagtccgtcagcaactgcctgagaaatataaggaaatattctttgatcagtcgaaaaacgggtacgcaggttatattgacggcggagcgagtcaagaggaattctacaagtttatcaaacccatattagagaagatggatgggacggaagagttgcttgtaaaactcaatcgcgaagatctactgcgaaagcagcggactttcgacaacggtagcattccacatcaaatccacttaggcgaattgcatgctatacttagaaggcaggaggatttttatccgttcctcaaagacaatcgtgaaaagattgagaaaatcctaacctttcgcataccttactatgtgggacccctggcccgagggaactctcggttcgcatggatgacaagaaagtccgaagaaacgattactccatggaattttgaggaagttgtcgataaaggtgcgtcagctcaatcgttcatcgagaggatgaccaactttgacaagaatttaccgaacgaaaaagtattgcctaagcacagtttactttacgagtatttcacagtgtacaatgaactcacgaaagttaagtatgtcactgagggcatgcgtaaacccgcctttctaagcggagaacagaagaaagcaatagtagatctgttattcaagaccaaccgcaaagtgacagttaagcaattgaaagaggactactttaagaaaattgaatgcttcgattctgtcgagatctccggggtagaagatcgatttaatgcgtcacttggtacgtatcatgacctcctaaagataattaaagataaggacttcctggataacgaagagaatgaagatatcttagaagatatagtgttgactcttaccctctttgaagatcgggaaatgattgaggaaagactaaaaacatacgctcacctgttcgacgataaggttatgaaacagttaaagaggcgtcgctatacgggctggggacgattgtcgcggaaacttatcaacgggataagagacaagcaaagtggtaaaactattctcgattttctaaagagcgacggcttcgccaataggaactttatgcagctgatccatgatgactctttaaccttcaaagaggatatacaaaaggcacaggtttccggacaaggggactcattgcacgaacatattgcgaatcttgctggttcgccagccatcaaaaagggcatactccagacagtcaaagtagtggatgagctagttaaggtcatgggacgtcacaaaccggaaaacattgtaatcgagatggcacgcgaaaatcaaacgactcagaaggggcaaaaaaacagtcgagagcggatgaagagaatagaagagggtattaaagaactgggcagccagatcttaaaggagcatcctgtggaaaatacccaattgcagaacgagaaactttacctctattacctacaaaatggaagggacatgtatgttgatcaggaactggacataaaccgtttatctgattacgacgtcgatgccattgtaccccaatcctttttgaaggacgattcaatcgacaataaagtgcttacacgctcggataagaaccgagggaaaagtgacaatgttccaagcgaggaagtcgtaaagaaaatgaagaactattggcggcagctcctaaatgcgaaactgataacgcaaagaaagttcgataacttaactaaagctgagaggggtggcttgtctgaacttgacaaggccggatttattaaacgtcagctcgtggaaacccgccaaatcacaaagcatgttgcacagatactagattcccgaatgaatacgaaatacgacgagaacgataagctgattcgggaagtcaaagtaatcactttaaagtcaaaattggtgtcggacttcagaaaggattttcaattctataaagttagggagataaataactaccaccatgcgcacgacgcttatcttaatgccgtcgtagggaccgcactcattaagaaatacccgaagctagaaagtgagtttgtgtatggtgattacaaagtttatgacgtccgtaagatgatcgcgaaaagcgaacaggagataggcaaggctacagccaaatacttcttttattctaacattatgaatttctttaagacggaaatcactctggcaaacggagagatacgcaaacgacctttaattgaaaccaatggggagacaggtgaaatcgtatgggataagggccgggacttcgcgacggtgagaaaagttttgtccatgccccaagtcaacatagtaaagaaaactgaggtgcagaccggagggttttcaaaggaatcgattcttccaaaaaggaatagtgataagctcatcgctcgtaaaaaggactgggacccgaaaaagtacggtggcttcgatagccctacagttgcctattctgtcctagtagtggcaaaagttgagaagggaaaatccaagaaactgaagtcagtcaaagaattattggggataacgattatggagcgctcgtcttttgaaaagaaccccatcgacttccttgaggcgaaaggttacaaggaagtaaaaaaggatctcataattaaactaccaaagtatagtctgtttgagttagaaaatggccgaaaacggatgttggctagcgccggagagcttcaaaaggggaacgaactcgcactaccgtctaaatacgtgaatttcctgtatttagcgtcccattacgagaagttgaaaggttcacctgaagataacgaacagaagcaactttttgttgagcagcacaaacattatctcgacgaaatcatagagcaaatttcggaattcagtaagagagtcatcctagctgatgccaatctggacaaagtattaagcgcatacaacaagcacagggataaacccatacgtgagcaggcggaaaatattatccatttgtttactcttaccaacctcggcgctccagccgcattcaagtattttgacacaacgatagatcgcaaacgatacacttctaccaaggaggtgctagacgcgacactgattcaccaatccatcacgggattatatgaaactcggatagatttgtcacagcttgggggtgacaactcaaagaaaaggtcactggaggacaacgaaacggaaatcaaagtctccagagacacctggaacactaagaacatgcggtccctggaaccgccacgaagcaagaaacggatacat

SEQ ID NO: 191 - DNA, 4965 bp, Artificial Sequence
  chemically synthesized
atgcccaaaaagaagaggaaagtcagctctacctgctttctcgaaaacattccatctgccactgaggatcacgaaaggtggcatacttcccccgacatcttggtccgacaatttcacctccctaaaagaatagcaaaagagatcgtagcacggtgccaggaatgtaaacgcaccacaacttctccggtccggggtacgaaccccagagggcgcttcttgtggcaaatggataatactcactggaataagacgataatatgggttgcagtcgagacaaattccggtctcgtggaagcgcaagttatcccggaggagaccgcactgcaagtagccttgtgtatccttcaacttattcaacgatacacggtcttgcatctccattctgacaatgggccctgttttactgcacatagaatagaaaacttgtgtaaatacctcggtattactaagactacgggtatcccatataatcctcagtcacagggcgtagtggagcgagcgcatcgggaccttaaagacagattggcagcctatcagggagactgcgaaacagtagaagccgcgctgagtcttgcattggtgtccctgaataaaaagcgggggggcataggaggccatacaccgtatgagatttacctggagtccgagcacacaaagtaccaagatcagttggagcagcagttctcaaagcaaaagatcgaagggggcgggggaagcggcggtggaggtagtggagggggaggatcagataaaaagtattctattggtttagccatcggcactaattccgttggatgggctgtcataaccgatgaatacaaagtaccttcaaagaaatttaaggtgttggggaacacagaccgtcattcgattaaaaagaatcttatcggtgccctcctattcgatagtggcgaaacggcagaggcgactcgcctgaaacgaaccgctcggagaaggtatacacgtcgcaagaaccgaatatgttacttacaagaaatttttagcaatgagatggccaaagttgacgattctttctttcaccgtttggaagagtccttccttgtcgaagaggacaagaaacatgaacggcaccccatctttggaaacatagtagatgaggtggcatatcatgaaaagtacccaacgatttatcacctcagaaaaaagctagttgactcaactgataaagcggacctgaggttaatctacttggctcttgcccatatgataaagttccgtgggcactttctcattgagggtgatctaaatccggacaactcggatgtcgacaaactgttcatccagttagtacaaacctataatcagttgtttgaagagaaccctataaatgcaagtggcgtggatgcgaaggctattcttagcgcccgcctctctaaatcccgacggctagaaaacctgatcgcacaattacccggagagaagaaaaatgggttgttcggtaaccttatagcgctctcactaggcctgacaccaaattttaagtcgaacttcgacttagctgaagatgccaaattgcagcttagtaaggacacgtacgatgacgatctcgacaatctactggcacaaattggagatcagtatgcggacttatttttggctgccaaaaaccttagcgatgcaatcctcctatctgacatactgagagttaatactgagattaccaaggcgccgttatccgcttcaatgatcaaaaggtacgatgaacatcaccaagacttgacacttctcaaggccctagtccgtcagcaactgcctgagaaatataaggaaatattctttgatcagtcgaaaaacgggtacgcaggttatattgacggcggagcgagtcaagaggaattctacaagtttatcaaacccatattagagaagatggatgggacggaagagttgcttgtaaaactcaatcgcgaagatctactgcgaaagcagcggactttcgacaacggtagcattccacatcaaatccacttaggcgaattgcatgctatacttagaaggcaggaggatttttatccgttcctcaaagacaatcgtgaaaagattgagaaaatcctaacctttcgcataccttactatgtgggacccctggcccgagggaactctcggttcgcatggatgacaagaaagtccgaagaaacgattactccatggaattttgaggaagttgtcgataaaggtgcgtcagctcaatcgttcatcgagaggatgaccaactttgacaagaatttaccgaacgaaaaagtattgcctaagcacagtttactttacgagtatttcacagtgtacaatgaactcacgaaagttaagtatgtcactgagggcatgcgtaaacccgcctttctaagcggagaacagaagaaagcaatagtagatctgttattcaagaccaaccgcaaagtgacagttaagcaattgaaagaggactactttaagaaaattgaatgcttcgattctgtcgagatctccggggtagaagatcgatttaatgcgtcacttggtacgtatcatgacctcctaaagataattaaagataaggacttcctggataacgaagagaatgaagatatcttagaagatatagtgttgactcttaccctctttgaagatcgggaaatgattgaggaaagactaaaaacatacgctcacctgttcgacgataaggttatgaaacagttaaagaggcgtcgctatacgggctggggacgattgtcgcggaaacttatcaacgggataagagacaagcaaagtggtaaaactattctcgattttctaaagagcgacggcttcgccaataggaactttatgcagctgatccatgatgactctttaaccttcaaagaggatatacaaaaggcacaggtttccggacaaggggactcattgcacgaacatattgcgaatcttgctggttcgccagccatcaaaaagggcatactccagacagtcaaagtagtggatgagctagttaaggtcatgggacgtcacaaaccggaaaacattgtaatcgagatggcacgcgaaaatcaaacgactcagaaggggcaaaaaaacagtcgagagcggatgaagagaatagaagagggtattaaagaactgggcagccagatcttaaaggagcatcctgtggaaaatacccaattgcagaacgagaaactttacctctattacctacaaaatggaagggacatgtatgttgatcaggaactggacataaaccgtttatctgattacgacgtcgatgccattgtaccccaatcctttttgaaggacgattcaatcgacaataaagtgcttacacgctcggataagaaccgagggaaaagtgacaatgttccaagcgaggaagtcgtaaagaaaatgaagaactattggcggcagctcctaaatgcgaaactgataacgcaaagaaagttcgataacttaactaaagctgagaggggtggcttgtctgaacttgacaaggccggatttattaaacgtcagctcgtggaaacccgccaaatcacaaagcatgttgcacagatactagattcccgaatgaatacgaaatacgacgagaacgataagctgattcgggaagtcaaagtaatcactttaaagtcaaaattggtgtcggacttcagaaaggattttcaattctataaagttagggagataaataactaccaccatgcgcacgacgcttatcttaatgccgtcgtagggaccgcactcattaagaaatacccgaagctagaaagtgagtttgtgtatggtgattacaaagtttatgacgtccgtaagatgatcgcgaaaagcgaacaggagataggcaaggctacagccaaatacttcttttattctaacattatgaatttctttaagacggaaatcactctggcaaacggagagatacgcaaacgacctttaattgaaaccaatggggagacaggtgaaatcgtatgggataagggccgggacttcgcgacggtgagaaaagttttgtccatgccccaagtcaacatagtaaagaaaactgaggtgcagaccggagggttttcaaaggaatcgattcttccaaaaaggaatagtgataagctcatcgctcgtaaaaaggactgggacccgaaaaagtacggtggcttcgatagccctacagttgcctattctgtcctagtagtggcaaaagttgagaagggaaaatccaagaaactgaagtcagtcaaagaattattggggataacgattatggagcgctcgtcttttgaaaagaaccccatcgacttccttgaggcgaaaggttacaaggaagtaaaaaaggatctcataattaaactaccaaagtatagtctgtttgagttagaaaatggccgaaaacggatgttggctagcgccggagagcttcaaaaggggaacgaactcgcactaccgtctaaatacgtgaatttcctgtatttagcgtcccattacgagaagttgaaaggttcacctgaagataacgaacagaagcaactttttgttgagcagcacaaacattatctcgacgaaatcatagagcaaatttcggaattcagtaagagagtcatcctagctgatgccaatctggacaaagtattaagcgcatacaacaagcacagggataaacccatacgtgagcaggcggaaaatattatccatttgtttactcttaccaacctcggcgctccagccgcattcaagtattttgacacaacgatagatcgcaaacgatacacttctaccaaggaggtgctagacgcgacactgattcaccaatccatcacgggattatatgaaactcggatagatttgtcacagcttgggggtgacaactcaaagaaaaggtcactggaggacaacgaaacggaaatcaaagtctccagagacacctggaacactaagaacatgcggtccctggaaccgccacgaagcaagaaacggatacat

SEQ ID NO: 192 - DNA, 5094 bp, Artificial Sequence
  chemically synthesized
atgcccaaaaagaagaggaaagtcagctctaatgtgcatacgtcagagtcaaccagaaagtacccctacccgttcattcataggatgttggcccatgcaaacgcgcagactatcaggtattctctcaagaataatacgatcacgtatttcaatgagagtgatgtggactggtcctccgcgattgactatcaatgcccggactgcctgattgggaagagtaccaaacatcgccatatcaagggaagtaggctcaaatatcagaacagctatgaaccttttcagtatctgcatacagacatattcgggccagtgcacaacctgccaaaaagcgctcctagctatttcattagtttcaccgacgaaacaacaaagtttaggtgggtttatccactgcacgacaggagggaagacagcatactcgatgtcttcacgacaattctggcgtttatcaagaatcagttccaagcgagcgtgttggtgatacagatggatagaggcagcgaatatactaaccgaactcttcacaaattcttggagaagaacgggataactccttgttacacaacaacagcagattcacgcgcacacggcgtcgcggagcggctcaacaggactctcctggacgattgccgcactcaactccagtgttcagggctcccaaaccatctctggttttctgccatagagttttctactatagtgcgcaattccctcgcgagcccaaaatctaagaaaagcgcgaggcaacatgcaggactggctggccttgacatctccacactgctgccttttggtcagccggtaattgtcaatgaccataaccccaacagcgggggcgggggaagcggcggtggaggtagtggagggggaggatcagataaaaagtattctattggtttagccatcggcactaattccgttggatgggctgtcataaccgatgaatacaaagtaccttcaaagaaatttaaggtgttggggaacacagaccgtcattcgattaaaaagaatcttatcggtgccctcctattcgatagtggcgaaacggcagaggcgactcgcctgaaacgaaccgctcggagaaggtatacacgtcgcaagaaccgaatatgttacttacaagaaatttttagcaatgagatggccaaagttgacgattctttctttcaccgtttggaagagtccttccttgtcgaagaggacaagaaacatgaacggcaccccatctttggaaacatagtagatgaggtggcatatcatgaaaagtacccaacgatttatcacctcagaaaaaagctagttgactcaactgataaagcggacctgaggttaatctacttggctcttgcccatatgataaagttccgtgggcactttctcattgagggtgatctaaatccggacaactcggatgtcgacaaactgttcatccagttagtacaaacctataatcagttgtttgaagagaaccctataaatgcaagtggcgtggatgcgaaggctattcttagcgcccgcctctctaaatcccgacggctagaaaacctgatcgcacaattacccggagagaagaaaaatgggttgttcggtaaccttatagcgctctcactaggcctgacaccaaattttaagtcgaacttcgacttagctgaagatgccaaattgcagcttagtaaggacacgtacgatgacgatctcgacaatctactggcacaaattggagatcagtatgcggacttatttttggctgccaaaaaccttagcgatgcaatcctcctatctgacatactgagagttaatactgagattaccaaggcgccgttatccgcttcaatgatcaaaaggtacgatgaacatcaccaagacttgacacttctcaaggccctagtccgtcagcaactgcctgagaaatataaggaaatattctttgatcagtcgaaaaacgggtacgcaggttatattgacggcggagcgagtcaagaggaattctacaagtttatcaaacccatattagagaagatggatgggacggaagagttgcttgtaaaactcaatcgcgaagatctactgcgaaagcagcggactttcgacaacggtagcattccacatcaaatccacttaggcgaattgcatgctatacttagaaggcaggaggatttttatccgttcctcaaagacaatcgtgaaaagattgagaaaatcctaacctttcgcataccttactatgtgggacccctggcccgagggaactctcggttcgcatggatgacaagaaagtccgaagaaacgattactccatggaattttgaggaagttgtcgataaaggtgcgtcagctcaatcgttcatcgagaggatgaccaactttgacaagaatttaccgaacgaaaaagtattgcctaagcacagtttactttacgagtatttcacagtgtacaatgaactcacgaaagttaagtatgtcactgagggcatgcgtaaacccgcctttctaagcggagaacagaagaaagcaatagtagatctgttattcaagaccaaccgcaaagtgacagttaagcaattgaaagaggactactttaagaaaattgaatgcttcgattctgtcgagatctccggggtagaagatcgatttaatgcgtcacttggtacgtatcatgacctcctaaagataattaaagataaggacttcctggataacgaagagaatgaagatatcttagaagatatagtgttgactcttaccctctttgaagatcgggaaatgattgaggaaagactaaaaacatacgctcacctgttcgacgataaggttatgaaacagttaaagaggcgtcgctatacgggctggggacgattgtcgcggaaacttatcaacgggataagagacaagcaaagtggtaaaactattctcgattttctaaagagcgacggcttcgccaataggaactttatgcagctgatccatgatgactctttaaccttcaaagaggatatacaaaaggcacaggtttccggacaaggggactcattgcacgaacatattgcgaatcttgctggttcgccagccatcaaaaagggcatactccagacagtcaaagtagtggatgagctagttaaggtcatgggacgtcacaaaccggaaaacattgtaatcgagatggcacgcgaaaatcaaacgactcagaaggggcaaaaaaacagtcgagagcggatgaagagaatagaagagggtattaaagaactgggcagccagatcttaaaggagcatcctgtggaaaatacccaattgcagaacgagaaactttacctctattacctacaaaatggaagggacatgtatgttgatcaggaactggacataaaccgtttatctgattacgacgtcgatgccattgtaccccaatcctttttgaaggacgattcaatcgacaataaagtgcttacacgctcggataagaaccgagggaaaagtgacaatgttccaagcgaggaagtcgtaaagaaaatgaagaactattggcggcagctcctaaatgcgaaactgataacgcaaagaaagttcgataacttaactaaagctgagaggggtggcttgtctgaacttgacaaggccggatttattaaacgtcagctcgtggaaacccgccaaatcacaaagcatgttgcacagatactagattcccgaatgaatacgaaatacgacgagaacgataagctgattcgggaagtcaaagtaatcactttaaagtcaaaattggtgtcggacttcagaaaggattttcaattctataaagttagggagataaataactaccaccatgcgcacgacgcttatcttaatgccgtcgtagggaccgcactcattaagaaatacccgaagctagaaagtgagtttgtgtatggtgattacaaagtttatgacgtccgtaagatgatcgcgaaaagcgaacaggagataggcaaggctacagccaaatacttcttttattctaacattatgaatttctttaagacggaaatcactctggcaaacggagagatacgcaaacgacctttaattgaaaccaatggggagacaggtgaaatcgtatgggataagggccgggacttcgcgacggtgagaaaagttttgtccatgccccaagtcaacatagtaaagaaaactgaggtgcagaccggagggttttcaaaggaatcgattcttccaaaaaggaatagtgataagctcatcgctcgtaaaaaggactgggacccgaaaaagtacggtggcttcgatagccctacagttgcctattctgtcctagtagtggcaaaagttgagaagggaaaatccaagaaactgaagtcagtcaaagaattattggggataacgattatggagcgctcgtcttttgaaaagaaccccatcgacttccttgaggcgaaaggttacaaggaagtaaaaaaggatctcataattaaactaccaaagtatagtctgtttgagttagaaaatggccgaaaacggatgttggctagcgccggagagcttcaaaaggggaacgaactcgcactaccgtctaaatacgtgaatttcctgtatttagcgtcccattacgagaagttgaaaggttcacctgaagataacgaacagaagcaactttttgttgagcagcacaaacattatctcgacgaaatcatagagcaaatttcggaattcagtaagagagtcatcctagctgatgccaatctggacaaagtattaagcgcatacaacaagcacagggataaacccatacgtgagcaggcggaaaatattatccatttgtttactcttaccaacctcggcgctccagccgcattcaagtattttgacacaacgatagatcgcaaacgatacacttctaccaaggaggtgctagacgcgacactgattcaccaatccatcacgggattatatgaaactcggatagatttgtcacagcttgggggtgacaactcaaagaaaaggtcactggaggacaacgaaacggaaatcaaagtctccagagacacctggaacactaagaacatgcggtccctggaaccgccacgaagcaagaaacggatacat

SEQ ID NO: 193 - DNA, 5154 bp, Artificial Sequence
  chemically synthesized
atgcccaaaaagaagaggaaagtcagctctaaatacgtctttattgaaaagcaccaggccgaattttccatcaaagctatgtgtagagtcttgagagttgcaagaagcggctggtacacctggtgtcagaggagaactcgcatatccacgcggcagcagtttcgacaacactgcgattccgtggtgttggccgcatttacgcgatcaaaacaaagatacggcgcacctcgccttaccgacgaactcagggcccaaggatacccatttaatgtgaaaacagttgcggccagtctgcgcaggcaagggctgcgcgctaaggcgagtagaaaatttagccccgtctcttatcgcgcacacggccttcccgtcagcgagaatcttcttgagcaagatttttacgcgtcaggccctaatcaaaagtgggccggggacataacgtatcttagaacagacgagggttggctctatctcgccgtcgtcattgacttgtggagtagggcggtcatagggtggagcatgtcaccacgcatgacagcccaactcgcgtgtgatgccctccaaatggctctgtggaggaggaagcgcccacgcaatgtgattgtgcacaccgatagaggcgggcagtattgtagcgccgattatcaggcgcagttgaagcgccataaccttcgaggtagcatgtccgcgaagggttgttgctatgacaatgcgtgcgtagaatcattctttcatagtttgaaggttgagtgcatccacggggagcattttatctcccgcgaaattatgagggcgacggtctttaactacatcgaatgcgattataatcggtggaggcgacactcttggtgtggtggtcttagcccggagcaatttgaaaacaaaaacctcgccgggggcgggggaagcggcggtggaggtagtggagggggaggatcagataaaaagtattctattggtttagccatcggcactaattccgttggatgggctgtcataaccgatgaatacaaagtaccttcaaagaaatttaaggtgttggggaacacagaccgtcattcgattaaaaagaatcttatcggtgccctcctattcgatagtggcgaaacggcagaggcgactcgcctgaaacgaaccgctcggagaaggtatacacgtcgcaagaaccgaatatgttacttacaagaaatttttagcaatgagatggccaaagttgacgattctttctttcaccgtttggaagagtccttccttgtcgaagaggacaagaaacatgaacggcaccccatctttggaaacatagtagatgaggtggcatatcatgaaaagtacccaacgatttatcacctcagaaaaaagctagttgactcaactgataaagcggacctgaggttaatctacttggctcttgcccatatgataaagttccgtgggcactttctcattgagggtgatctaaatccggacaactcggatgtcgacaaactgttcatccagttagtacaaacctataatcagttgtttgaagagaaccctataaatgcaagtggcgtggatgcgaaggctattcttagcgcccgcctctctaaatcccgacggctagaaaacctgatcgcacaattacccggagagaagaaaaatgggttgttcggtaaccttatagcgctctcactaggcctgacaccaaattttaagtcgaacttcgacttagctgaagatgccaaattgcagcttagtaaggacacgtacgatgacgatctcgacaatctactggcacaaattggagatcagtatgcggacttatttttggctgccaaaaaccttagcgatgcaatcctcctatctgacatactgagagttaatactgagattaccaaggcgccgttatccgcttcaatgatcaaaaggtacgatgaacatcaccaagacttgacacttctcaaggccctagtccgtcagcaactgcctgagaaatataaggaaatattctttgatcagtcgaaaaacgggtacgcaggttatattgacggcggagcgagtcaagaggaattctacaagtttatcaaacccatattagagaagatggatgggacggaagagttgcttgtaaaactcaatcgcgaagatctactgcgaaagcagcggactttcgacaacggtagcattccacatcaaatccacttaggcgaattgcatgctatacttagaaggcaggaggatttttatccgttcctcaaagacaatcgtgaaaagattgagaaaatcctaacctttcgcataccttactatgtgggacccctggcccgagggaactctcggttcgcatggatgacaagaaagtccgaagaaacgattactccatggaattttgaggaagttgtcgataaaggtgcgtcagctcaatcgttcatcgagaggatgaccaactttgacaagaatttaccgaacgaaaaagtattgcctaagcacagtttactttacgagtatttcacagtgtacaatgaactcacgaaagttaagtatgtcactgagggcatgcgtaaacccgcctttctaagcggagaacagaagaaagcaatagtagatctgttattcaagaccaaccgcaaagtgacagttaagcaattgaaagaggactactttaagaaaattgaatgcttcgattctgtcgagatctccggggtagaagatcgatttaatgcgtcacttggtacgtatcatgacctcctaaagataattaaagataaggacttcctggataacgaagagaatgaagatatcttagaagatatagtgttgactcttaccctctttgaagatcgggaaatgattgaggaaagactaaaaacatacgctcacctgttcgacgataaggttatgaaacagttaaagaggcgtcgctatacgggctggggacgattgtcgcggaaacttatcaacgggataagagacaagcaaagtggtaaaactattctcgattttctaaagagcgacggcttcgccaataggaactttatgcagctgatccatgatgactctttaaccttcaaagaggatatacaaaaggcacaggtttccggacaaggggactcattgcacgaacatattgcgaatcttgctggttcgccagccatcaaaaagggcatactccagacagtcaaagtagtggatgagctagttaaggtcatgggacgtcacaaaccggaaaacattgtaatcgagatggcacgcgaaaatcaaacgactcagaaggggcaaaaaaacagtcgagagcggatgaagagaatagaagagggtattaaagaactgggcagccagatcttaaaggagcatcctgtggaaaatacccaattgcagaacgagaaactttacctctattacctacaaaatggaagggacatgtatgttgatcaggaactggacataaaccgtttatctgattacgacgtcgatgccattgtaccccaatcctttttgaaggacgattcaatcgacaataaagtgcttacacgctcggataagaaccgagggaaaagtgacaatgttccaagcgaggaagtcgtaaagaaaatgaagaactattggcggcagctcctaaatgcgaaactgataacgcaaagaaagttcgataacttaactaaagctgagaggggtggcttgtctgaacttgacaaggccggatttattaaacgtcagctcgtggaaacccgccaaatcacaaagcatgttgcacagatactagattcccgaatgaatacgaaatacgacgagaacgataagctgattcgggaagtcaaagtaatcactttaaagtcaaaattggtgtcggacttcagaaaggattttcaattctataaagttagggagataaataactaccaccatgcgcacgacgcttatcttaatgccgtcgtagggaccgcactcattaagaaatacccgaagctagaaagtgagtttgtgtatggtgattacaaagtttatgacgtccgtaagatgatcgcgaaaagcgaacaggagataggcaaggctacagccaaatacttcttttattctaacattatgaatttctttaagacggaaatcactctggcaaacggagagatacgcaaacgacctttaattgaaaccaatggggagacaggtgaaatcgtatgggataagggccgggacttcgcgacggtgagaaaagttttgtccatgccccaagtcaacatagtaaagaaaactgaggtgcagaccggagggttttcaaaggaatcgattcttccaaaaaggaatagtgataagctcatcgctcgtaaaaaggactgggacccgaaaaagtacggtggcttcgatagccctacagttgcctattctgtcctagtagtggcaaaagttgagaagggaaaatccaagaaactgaagtcagtcaaagaattattggggataacgattatggagcgctcgtcttttgaaaagaaccccatcgacttccttgaggcgaaaggttacaaggaagtaaaaaaggatctcataattaaactaccaaagtatagtctgtttgagttagaaaatggccgaaaacggatgttggctagcgccggagagcttcaaaaggggaacgaactcgcactaccgtctaaatacgtgaatttcctgtatttagcgtcccattacgagaagttgaaaggttcacctgaagataacgaacagaagcaactttttgttgagcagcacaaacattatctcgacgaaatcatagagcaaatttcggaattcagtaagagagtcatcctagctgatgccaatctggacaaagtattaagcgcatacaacaagcacagggataaacccatacgtgagcaggcggaaaatattatccatttgtttactcttaccaacctcggcgctccagccgcattcaagtattttgacacaacgatagatcgcaaacgatacacttctaccaaggaggtgctagacgcgacactgattcaccaatccatcacgggattatatgaaactcggatagatttgtcacagcttgggggtgacaactcaaagaaaaggtcactggaggacaacgaaacggaaatcaaagtctccagagacacctggaacactaagaacatgcggtccctggaaccgccacgaagcaagaaacggatacat

SEQ ID NO: 194 - DNA, 4818 bp, Artificial Sequence
  chemically synthesized
atgcccaaaaagaagaggaaagtcagctctgtcagcgagaatcttcttgagcaagatttttacgcgtcaggccctaatcaaaagtgggccggggacataacgtatcttagaacagacgagggttggctctatctcgccgtcgtcattgacttgtggagtagggcggtcatagggtggagcatgtcaccacgcatgacagcccaactcgcgtgtgatgccctccaaatggctctgtggaggaggaagcgcccacgcaatgtgattgtgcacaccgatagaggcgggcagtattgtagcgccgattatcaggcgcagttgaagcgccataaccttcgaggtagcatgtccgcgaagggttgttgctatgacaatgcgtgcgtagaatcattctttcatagtttgaaggttgagtgcatccacggggagcattttatctcccgcgaaattatgagggcgacggtctttaactacatcgaatgcgattataatcggtggaggcgacactcttggtgtggtggtcttagcccggagcaatttgaaaacaaaaacctcgccgggggcgggggaagcggcggtggaggtagtggagggggaggatcagataaaaagtattctattggtttagccatcggcactaattccgttggatgggctgtcataaccgatgaatacaaagtaccttcaaagaaatttaaggtgttggggaacacagaccgtcattcgattaaaaagaatcttatcggtgccctcctattcgatagtggcgaaacggcagaggcgactcgcctgaaacgaaccgctcggagaaggtatacacgtcgcaagaaccgaatatgttacttacaagaaatttttagcaatgagatggccaaagttgacgattctttctttcaccgtttggaagagtccttccttgtcgaagaggacaagaaacatgaacggcaccccatctttggaaacatagtagatgaggtggcatatcatgaaaagtacccaacgatttatcacctcagaaaaaagctagttgactcaactgataaagcggacctgaggttaatctacttggctcttgcccatatgataaagttccgtgggcactttctcattgagggtgatctaaatccggacaactcggatgtcgacaaactgttcatccagttagtacaaacctataatcagttgtttgaagagaaccctataaatgcaagtggcgtggatgcgaaggctattcttagcgcccgcctctctaaatcccgacggctagaaaacctgatcgcacaattacccggagagaagaaaaatgggttgttcggtaaccttatagcgctctcactaggcctgacaccaaattttaagtcgaacttcgacttagctgaagatgccaaattgcagcttagtaaggacacgtacgatgacgatctcgacaatctactggcacaaattggagatcagtatgcggacttatttttggctgccaaaaaccttagcgatgcaatcctcctatctgacatactgagagttaatactgagattaccaaggcgccgttatccgcttcaatgatcaaaaggtacgatgaacatcaccaagacttgacacttctcaaggccctagtccgtcagcaactgcctgagaaatataaggaaatattctttgatcagtcgaaaaacgggtacgcaggttatattgacggcggagcgagtcaagaggaattctacaagtttatcaaacccatattagagaagatggatgggacggaagagttgcttgtaaaactcaatcgcgaagatctactgcgaaagcagcggactttcgacaacggtagcattccacatcaaatccacttaggcgaattgcatgctatacttagaaggcaggaggatttttatccgttcctcaaagacaatcgtgaaaagattgagaaaatcctaacctttcgcataccttactatgtgggacccctggcccgagggaactctcggttcgcatggatgacaagaaagtccgaagaaacgattactccatggaattttgaggaagttgtcgataaaggtgcgtcagctcaatcgttcatcgagaggatgaccaactttgacaagaatttaccgaacgaaaaagtattgcctaagcacagtttactttacgagtatttcacagtgtacaatgaactcacgaaagttaagtatgtcactgagggcatgcgtaaacccgcctttctaagcggagaacagaagaaagcaatagtagatctgttattcaagaccaaccgcaaagtgacagttaagcaattgaaagaggactactttaagaaaattgaatgcttcgattctgtcgagatctccggggtagaagatcgatttaatgcgtcacttggtacgtatcatgacctcctaaagataattaaagataaggacttcctggataacgaagagaatgaagatatcttagaagatatagtgttgactcttaccctctttgaagatcgggaaatgattgaggaaagactaaaaacatacgctcacctgttcgacgataaggttatgaaacagttaaagaggcgtcgctatacgggctggggacgattgtcgcggaaacttatcaacgggataagagacaagcaaagtggtaaaactattctcgattttctaaagagcgacggcttcgccaataggaactttatgcagctgatccatgatgactctttaaccttcaaagaggatatacaaaaggcacaggtttccggacaaggggactcattgcacgaacatattgcgaatcttgctggttcgccagccatcaaaaagggcatactccagacagtcaaagtagtggatgagctagttaaggtcatgggacgtcacaaaccggaaaacattgtaatcgagatggcacgcgaaaatcaaacgactcagaaggggcaaaaaaacagtcgagagcggatgaagagaatagaagagggtattaaagaactgggcagccagatcttaaaggagcatcctgtggaaaatacccaattgcagaacgagaaactttacctctattacctacaaaatggaagggacatgtatgttgatcaggaactggacataaaccgtttatctgattacgacgtcgatgccattgtaccccaatcctttttgaaggacgattcaatcgacaataaagtgcttacacgctcggataagaaccgagggaaaagtgacaatgttccaagcgaggaagtcgtaaagaaaatgaagaactattggcggcagctcctaaatgcgaaactgataacgcaaagaaagttcgataacttaactaaagctgagaggggtggcttgtctgaacttgacaaggccggatttattaaacgtcagctcgtggaaacccgccaaatcacaaagcatgttgcacagatactagattcccgaatgaatacgaaatacgacgagaacgataagctgattcgggaagtcaaagtaatcactttaaagtcaaaattggtgtcggacttcagaaaggattttcaattctataaagttagggagataaataactaccaccatgcgcacgacgcttatcttaatgccgtcgtagggaccgcactcattaagaaatacccgaagctagaaagtgagtttgtgtatggtgattacaaagtttatgacgtccgtaagatgatcgcgaaaagcgaacaggagataggcaaggctacagccaaatacttcttttattctaacattatgaatttctttaagacggaaatcactctggcaaacggagagatacgcaaacgacctttaattgaaaccaatggggagacaggtgaaatcgtatgggataagggccgggacttcgcgacggtgagaaaagttttgtccatgccccaagtcaacatagtaaagaaaactgaggtgcagaccggagggttttcaaaggaatcgattcttccaaaaaggaatagtgataagctcatcgctcgtaaaaaggactgggacccgaaaaagtacggtggcttcgatagccctacagttgcctattctgtcctagtagtggcaaaagttgagaagggaaaatccaagaaactgaagtcagtcaaagaattattggggataacgattatggagcgctcgtcttttgaaaagaaccccatcgacttccttgaggcgaaaggttacaaggaagtaaaaaaggatctcataattaaactaccaaagtatagtctgtttgagttagaaaatggccgaaaacggatgttggctagcgccggagagcttcaaaaggggaacgaactcgcactaccgtctaaatacgtgaatttcctgtatttagcgtcccattacgagaagttgaaaggttcacctgaagataacgaacagaagcaactttttgttgagcagcacaaacattatctcgacgaaatcatagagcaaatttcggaattcagtaagagagtcatcctagctgatgccaatctggacaaagtattaagcgcatacaacaagcacagggataaacccatacgtgagcaggcggaaaatattatccatttgtttactcttaccaacctcggcgctccagccgcattcaagtattttgacacaacgatagatcgcaaacgatacacttctaccaaggaggtgctagacgcgacactgattcaccaatccatcacgggattatatgaaactcggatagatttgtcacagcttgggggtgacaactcaaagaaaaggtcactggaggacaacgaaacggaaatcaaagtctccagagacacctggaacactaagaacatgcggtccctggaaccgccacgaagcaagaaacggatacat

SEQ ID NO: 195 - DNA, 5019 bp, Artificial Sequence
  chemically synthesized
atggactacaaagaccatgacggtgattataaagatcatgacatcgattacaaggatgacgatgacaagggcggaaactcaaagaaaaggtcactggaggacaacgaaacggaaatcaaagtctccagagacacctggaacactaagaacatgcggtccctggaaccgccacgaagcaagaaacggatacatggaggcgataaaaagtattctattggtttagccatcggcactaattccgttggatgggctgtcataaccgatgaatacaaagtaccttcaaagaaatttaaggtgttggggaacacagaccgtcattcgattaaaaagaatcttatcggtgccctcctattcgatagtggcgaaacggcagaggcgactcgcctgaaacgaaccgctcggagaaggtatacacgtcgcaagaaccgaatatgttacttacaagaaatttttagcaatgagatggccaaagttgacgattctttctttcaccgtttggaagagtccttccttgtcgaagaggacaagaaacatgaacggcaccccatctttggaaacatagtagatgaggtggcatatcatgaaaagtacccaacgatttatcacctcagaaaaaagctagttgactcaactgataaagcggacctgaggttaatctacttggctcttgcccatatgataaagttccgtgggcactttctcattgagggtgatctaaatccggacaactcggatgtcgacaaactgttcatccagttagtacaaacctataatcagttgtttgaagagaaccctataaatgcaagtggcgtggatgcgaaggctattcttagcgcccgcctctctaaatcccgacggctagaaaacctgatcgcacaattacccggagagaagaaaaatgggttgttcggtaaccttatagcgctctcactaggcctgacaccaaattttaagtcgaacttcgacttagctgaagatgccaaattgcagcttagtaaggacacgtacgatgacgatctcgacaatctactggcacaaattggagatcagtatgcggacttatttttggctgccaaaaaccttagcgatgcaatcctcctatctgacatactgagagttaatactgagattaccaaggcgccgttatccgcttcaatgatcaaaaggtacgatgaacatcaccaagacttgacacttctcaaggccctagtccgtcagcaactgcctgagaaatataaggaaatattctttgatcagtcgaaaaacgggtacgcaggttatattgacggcggagcgagtcaagaggaattctacaagtttatcaaacccatattagagaagatggatgggacggaagagttgcttgtaaaactcaatcgcgaagatctactgcgaaagcagcggactttcgacaacggtagcattccacatcaaatccacttaggcgaattgcatgctatacttagaaggcaggaggatttttatccgttcctcaaagacaatcgtgaaaagattgagaaaatcctaacctttcgcataccttactatgtgggacccctggcccgagggaactctcggttcgcatggatgacaagaaagtccgaagaaacgattactccatggaattttgaggaagttgtcgataaaggtgcgtcagctcaatcgttcatcgagaggatgaccaactttgacaagaatttaccgaacgaaaaagtattgcctaagcacagtttactttacgagtatttcacagtgtacaatgaactcacgaaagttaagtatgtcactgagggcatgcgtaaacccgcctttctaagcggagaacagaagaaagcaatagtagatctgttattcaagaccaaccgcaaagtgacagttaagcaattgaaagaggactactttaagaaaattgaatgcttcgattctgtcgagatctccggggtagaagatcgatttaatgcgtcacttggtacgtatcatgacctcctaaagataattaaagataaggacttcctggataacgaagagaatgaagatatcttagaagatatagtgttgactcttaccctctttgaagatcgggaaatgattgaggaaagactaaaaacatacgctcacctgttcgacgataaggttatgaaacagttaaagaggcgtcgctatacgggctggggacgattgtcgcggaaacttatcaacgggataagagacaagcaaagtggtaaaactattctcgattttctaaagagcgacggcttcgccaataggaactttatgcagctgatccatgatgactctttaaccttcaaagaggatatacaaaaggcacaggtttccggacaaggggactcattgcacgaacatattgcgaatcttgctggttcgccagccatcaaaaagggcatactccagacagtcaaagtagtggatgagctagttaaggtcatgggacgtcacaaaccggaaaacattgtaatcgagatggcacgcgaaaatcaaacgactcagaaggggcaaaaaaacagtcgagagcggatgaagagaatagaagagggtattaaagaactgggcagccagatcttaaaggagcatcctgtggaaaatacccaattgcagaacgagaaactttacctctattacctacaaaatggaagggacatgtatgttgatcaggaactggacataaaccgtttatctgattacgacgtcgatgccattgtaccccaatcctttttgaaggacgattcaatcgacaataaagtgcttacacgctcggataagaaccgagggaaaagtgacaatgttccaagcgaggaagtcgtaaagaaaatgaagaactattggcggcagctcctaaatgcgaaactgataacgcaaagaaagttcgataacttaactaaagctgagaggggtggcttgtctgaacttgacaaggccggatttattaaacgtcagctcgtggaaacccgccaaatcacaaagcatgttgcacagatactagattcccgaatgaatacgaaatacgacgagaacgataagctgattcgggaagtcaaagtaatcactttaaagtcaaaattggtgtcggacttcagaaaggattttcaattctataaagttagggagataaataactaccaccatgcgcacgacgcttatcttaatgccgtcgtagggaccgcactcattaagaaatacccgaagctagaaagtgagtttgtgtatggtgattacaaagtttatgacgtccgtaagatgatcgcgaaaagcgaacaggagataggcaaggctacagccaaatacttcttttattctaacattatgaatttctttaagacggaaatcactctggcaaacggagagatacgcaaacgacctttaattgaaaccaatggggagacaggtgaaatcgtatgggataagggccgggacttcgcgacggtgagaaaagttttgtccatgccccaagtcaacatagtaaagaaaactgaggtgcagaccggagggttttcaaaggaatcgattcttccaaaaaggaatagtgataagctcatcgctcgtaaaaaggactgggacccgaaaaagtacggtggcttcgatagccctacagttgcctattctgtcctagtagtggcaaaagttgagaagggaaaatccaagaaactgaagtcagtcaaagaattattggggataacgattatggagcgctcgtcttttgaaaagaaccccatcgacttccttgaggcgaaaggttacaaggaagtaaaaaaggatctcataattaaactaccaaagtatagtctgtttgagttagaaaatggccgaaaacggatgttggctagcgccggagagcttcaaaaggggaacgaactcgcactaccgtctaaatacgtgaatttcctgtatttagcgtcccattacgagaagttgaaaggttcacctgaagataacgaacagaagcaactttttgttgagcagcacaaacattatctcgacgaaatcatagagcaaatttcggaattcagtaagagagtcatcctagctgatgccaatctggacaaagtattaagcgcatacaacaagcacagggataaacccatacgtgagcaggcggaaaatattatccatttgtttactcttaccaacctcggcgctccagccgcattcaagtattttgacacaacgatagatcgcaaacgatacacttctaccaaggaggtgctagacgcgacactgattcaccaatccatcacgggattatatgaaactcggatagatttgtcacagcttgggggtgacggaggtggaggaagcggcggtggaggtagtggaggtggaggatcactcgagtttttggacggtattgacaaagctcaggacgaacatgaaaagtaccactctaactggagagctatggcctccgattttaatcttccgccggtggtagcgaaagaaatcgttgccagttgcgacaaatgccaattgaagggagaagccatgcatggtcaagtggattgttcccccggaatatggcaactcgattgcacgcatctggaaggcaaggtcatcctcgtagcggtacatgttgcttctggatatattgaggccgaggttataccggcagaaacgggccaagaaacagcgtactttctcctgaagcttgcgggacgctggcctgtgaaaacgattcataccgacaacggttctaactttaccggagcaacagtacgggccgcatgctggtgggccggtataaagcaggaatttgggattccatacaatccgcaaagtcaaggtgtcgtcgagtctatgaataaggaactcaaaaagataattggtcaggttagagatcaagccgaacatctcaagacggcggtccaaatggcagtttttattcacaactttaagaggaaaggtgggattggtggctattcagcaggggagcgaatagtggacataatagcaaccgacatacagactaaggagttgcaaaagcagatcacaaagattcaaaattaa

SEQ ID NO: 196 - DNA, 4157 bp, Artificial Sequence
  chemically synthesized
atgcccaaaaagaagaggaaagtcagctcttttttggacggtattgacaaagctcaggacgaacatgaaaagtaccactctaactggagagctatggcctccgattttaatcttccgccggtggtagcgaaagaaatcgttgccagttgcgacaaatgccaattgaagggagaagccatgcatggtcaagtggattgttcccccggaatatggcaactcgattgcacgcatctggaaggcaaggtcatcctcgtagcggtacatgttgcttctggatatattgaggccgaggttataccggcagaaacgggccaagaaacagcgtactttctcctgaagcttgcgggacgctggcctgtgaaaacgattcataccgacaacggttctaactttaccggagcaacagtacgggccgcatgctggtgggccggtataaagcaggaatttgggattccatacaatccgcaaagtcaaggtgtcgtcgagtctatgaataaggaactcaaaaagataattggtcaggttagagatcaagccgaacatctcaagacggcggtccaaatggcagtttttattcacaactttaagaggaaaggtgggattggtggctattcagcaggggagcgaatagtggacataatagcaaccgacatacagactaaggagttgcaaaagcagatcacaaagattcaaaatcttaagggaggcggcgggagtggcggcggtgggagcggcggtggcggctcaggtggcggagggtccggaggcggaggtagcggtggaggcggtagcacgcgtgggataagcggaactacatcctgggcctggccatcggcatcaccagcgtgggctacggcatcatcgactacgagacacgggacgtgatcgatgccggcgtgcggctgttcaaagaggccaacgtggaaaacaacgagggcaggcggagcaagagaggcgccagaaggctgaagcggcggaggcggcatagaatccagagagtgaagaagctgctgttcgactacaacctgctgaccgaccacagcgagctgagcggcatcaacccctacgaggccagagtgaagggcctgagccagaagctgagcgaggaagagttctctgccgccctgctgcacctggccaagagaagaggcgtgcacaacgtgaacgaggtggaagaggacaccggcaacgagctgtccaccaaagagcagatcagccggaacagcaaggccctggaagagaaatacgtggccgaactgcagctggaacggctgaagaaagacggcgaagtgcggggcagcatcaacagattcaagaccagcgactacgtgaaagaagccaaacagctgctgaaggtgcagaaggcctaccaccagctggaccagagcttcatcgacacctacatcgacctgctggaaacccggcggacctactatgagggacctggcgagggcagccccttcggctggaaggacatcaaagaatggtacgagatgctgatgggccactgcacctacttccccgaggaactgcggagcgtgaagtacgcctacaacgccgacctgtacaacgccctgaacgacctgaacaatctcgtgatcaccagggacgagaacgagaagctggaatattacgagaagttccagatcatcgagaacgtgttcaagcagaagaagaagcccaccctgaagcagatcgccaaagaaatcctcgtgaacgaagaggatattaagggctacagagtgaccagcaccggcaagcccgagttcaccaacctgaaggtgtaccacgacatcaaggacattaccgcccggaaagagattattgagaacgccgagctgctggatcagattgccaagatcctgaccatctaccagagcagcgaggacatccaggaagaactgaccaatctgaactccgagctgacccaggaagagatcgagcagatctctaatctgaagggctataccggcacccacaacctgagcctgaaggccatcaacctgatcctggacgagctgtggcacaccaacgacaaccagatcgctatcttcaaccggctgaagctggtgcccaagaaggtggacctgtcccagcagaaagagatccccaccaccctggtggacgacttcatcctgagccccgtcgtgaagagaagcttcatccagagcatcaaagtgatcaacgccatcatcaagaagtacggcctgcccaacgacatcattatcgagctggcccgcgagaagaactccaaggacgcccagaaaatgatcaacgagatgcagaagcggaaccggcagaccaacgagcggatcgaggaaatcatccggaccaccggcaaagagaacgccaagtacctgatcgagaagatcaagctgcacgacatgcaggaaggcaagtgcctgtacagcctggaagccatccctctggaagatctgctgaacaaccccttcaactatgaggtggaccacatcatccccagaagcgtgtccttcgacaacagcttcaacaacaaggtgctcgtgaagcaggaagaagccagcaagaagggcaaccggaccccattccagtacctgagcagcagcgacagcaagatcagctacgaaaccttcaagaagcacatcctgaatctggccaagggcaagggcagaatcagcaagaccaagaaagagtatctgctggaagaacgggacatcaacaggttctccgtgcagaaagacttcatcaaccggaacctggtggataccagatacgccaccagaggcctgatgaacctgctgcggagctacttcagagtgaacaacctggacgtgaaagtgaagtccatcaatggcggcttcaccagctttctgcggcggaagtggaagtttaagaaagagcggaacaaggggtacaagcaccacgccgaggacgccctgatcattgccaacgccgatttcatcttcaaagagtggaagaaactggacaaggccaaaaaagtgatggaaaaccagatgttcgaggaaaagcaggccgagagcatgcccgagatcgaaaccgagcaggagtacaaagagatcttcatcaccccccaccagatcaagcacattaaggacttcaaggactacaagtacagccaccgggtggacaagaagcctaatagagagctgattaacgacaccctgtactccacccggaaggacgacaagggcaacaccctgatcgtgaacaatctgaacggcctgtacgacaaggacaatgacaagctgaaaaagctgatcaacaagagccccgaaaagctgctgatgtaccaccacgacccccagacctaccagaaactgaagctgattatggaacagtacggcgacgagaagaatcccctgtacaagtactacgaggaaaccgggaactacctgaccaagtactccaaaaaggacaacggccccgtgatcaagaagattaagtattacggcaacaaactgaacgcccatctggacatcaccgacgactaccccaacagcagaaacaaggtcgtgaagctgtccctgaagccctacagattcgacgtgtacctggacaatggcgtgtacaagttcgtgaccgtgaagaatctggatgtgatcaaaaaagaaaactactacgaagtgaatagcaagtgctatgaggaagctaagaagctgaagaagatcagcaaccaggccgagtttatcgcctccttctacaacaacgatctgatcaagatcaacggcgagctgtatagagtgatcggcgtgaacaacgacctgctgaaccggatcgaagtgaacatgatcgacatcacctaccgcgagtacctggaaaacatgaacgacaagaggccccccaggatcattaagacaatcgcctccaagacccagagcattaagaagtacagcacagacattctgggcaacctgtatgaagtgaaatctaagaagcaccctcagatcatcaaaaagggcggatccaactcaaagaaaaggtcactggaggacaacgaaacggaaatcaaagtctccagagacacctggaacactaagaacatgcggtccctggaaccgccacgaagcaagaaacggatacatctcgaggactacaaagaccatgacggtgattataaagatcatgacatcgattacaaggatgacgatgacaagtaa

SEQ ID NO: 197 - DNA, 30 bp, Artificial Sequence
  chemically synthesized
actggaagggctaattcactcccaaagaag

SEQ ID NO: 198 - DNA, 30 bp, Artificial Sequence
  chemically synthesized
ttttagtcagtgtggaaaatctctagcagt

SEQ ID NO: 199 - DNA, 18 bp, Artificial Sequence
  chemically synthesized
aatgtagtcttatgcaat

SEQ ID NO: 200 - DNA, 18 bp, Artificial Sequence
  chemically synthesized
gaagcagaaggcttcatt

SEQ ID NO: 201 - DNA, 30 bp, Artificial Sequence
  chemically synthesized
tgtggtggaatgccactagaaactagggaa

SEQ ID NO: 202 - DNA, 30 bp, Artificial Sequence
  chemically synthesized
gataatcaatatacaaaattccatgacaat

SEQ ID NO: 203 - DNA, 30 bp, Artificial Sequence
  chemically synthesized
actgtggggtttttatgaggggttttataa

SEQ ID NO: 204 - DNA, 30 bp, Artificial Sequence
  chemically synthesized
ctctagtttgtctgttcgagatcctacagt

SEQ ID NO: 205 - DNA, 15 bp, Artificial Sequence
  chemically synthesized
aatgaaagaccccac

SEQ ID NO: 206 - DNA, 15 bp, Artificial Sequence
  chemically synthesized
cgggggtctttcatt

SEQ ID NO: 207 - DNA, 30 bp, Artificial Sequence
  chemically synthesized
aatgccgcgcctgcagcagaaatggttgaa

SEQ ID NO: 208 - DNA, 30 bp, Artificial Sequence
  chemically synthesized
gtgaccctcaggtcggccgactgcggcagc

SEQ ID NO: 209 - DNA, 30 bp, Artificial Sequence
  chemically synthesized
aatgagaaactaatttttgttattttatta

SEQ ID NO: 210 - DNA, 30 bp, Artificial Sequence
  chemically synthesized
aatttagataagtgaatttgaattaacatt

SEQ ID NO: 211 - DNA, 30 bp, Artificial Sequence
  chemically synthesized
tttgtatgaaagatcatgccgacctaggcg

SEQ ID NO: 212 - DNA, 30 bp, Artificial Sequence
  chemically synthesized
tctagcggccaggagagaccggcaaacaat

SEQ ID NO: 213 - DNA, 30 bp, Artificial Sequence
  chemically synthesized
actggaagggatttattacagtgcaagaag

SEQ ID NO: 214 - DNA, 30 bp, Artificial Sequence
  chemically synthesized
ggaaaccgaagcaggaaaatccctagcaga

SEQ ID NO: 215 - DNA, 30 bp, Artificial Sequence
  chemically synthesized
actgggatgagtattggaaccctgaagaaa

SEQ ID NO: 216 - DNA, 30 bp, Artificial Sequence
  chemically synthesized
tctcggaatccgggccgagaacttcgcagt

SEQ ID NO: 217 - DNA, 26 bp, Artificial Sequence
  chemically synthesized
actgtggggcagggtgggacctcagg

SEQ ID NO: 218 - DNA, 26 bp, Artificial Sequence
  chemically synthesized
cggggcggtgaagaacacccaacagt

SEQ ID NO: 219 - DNA, 30 bp, Artificial Sequence
  chemically synthesized
tgttggaatagaaatcaactatcatctact

SEQ ID NO: 220 - DNA, 30 bp, Artificial Sequence; identical to SEQ ID NO: 219
  chemically synthesized

SEQ ID NO: 221 - DNA, 50 bp, Artificial Sequence
  chemically synthesized
tgatcttacccagcaatagtggacacgcggctaagtgagtaaactctcag

SEQ ID NO: 222 - DNA, 50 bp, Artificial Sequence
  chemically synthesized
aaaacaagaacctcgcttaggcctgtgtccatattacgtgggtaggatca

SEQ ID NO: 223 - DNA, 164 bp, Artificial Sequence
  chemically synthesized
gaattcagacccgcaagtactggaagggctaattcactcccaaagaagaaggatccaaatcgataagagctcaacaattgaaaggcctaactcgagaatctagaaagcggccgcaattttagtcagtgtggaaaatctctagcagtactagcgggtcagaattc

SEQ ID NO: 224 - DNA, 140 bp, Artificial Sequence
  chemically synthesized
gaattcagacccgcaagtaatgtagtcttatgcaataaggatccaaatcgataagagctcaacaattgaaaggcctaactcgagaatctagaaagcggccgcaagaagcagaaggcttcattactagcgggtcagaattc

SEQ ID NO: 225 - DNA, 134 bp, Artificial Sequence
  chemically synthesized
gaattcagacccgcaagtaatgaaagaccccacaaggatccaaatcgataagagctcaacaattgaaaggcctaactcgagaatctagaaagcggccgcaacgggggtctttcattactagcgggtcagaattc

SEQ ID NO: 226 - DNA, 164 bp, Artificial Sequence
  chemically synthesized
gaattcagacccgcaagtaatgccgcgcctgcagcagaaatggttgaaaaggatccaaatcgataagagctcaacaattgaaaggcctaactcgagaatctagaaagcggccgcaagtgaccctcaggtcggccgactgcggcagcactagcgggtcagaattc

SEQ ID NO: 227 - DNA, 164 bp, Artificial Sequence
  chemically synthesized
gaattcagacccgcaagttttgtatgaaagatcatgccgacctaggcgaaggatccaaatcgataagagctcaacaattgaaaggcctaactcgagaatctagaaagcggccgcaatctagcggccaggagagaccggcaaacaatactagcgggtcagaattc

SEQ ID NO: 228 - DNA, 164 bp, Artificial Sequence
  chemically synthesized
gaattcagacccgcaagtaatgagaaactaatttttgttattttattaaaggatccaaatcgataagagctcaacaattgaaaggcctaactcgagaatctagaaagcggccgcaaaatttagataagtgaatttgaattaacattactagcgggtcagaattc

SEQ ID NO: 229 - DNA, 164 bp, Artificial Sequence
  chemically synthesized
gaattcagacccgcaagtactgtggggtttttatgaggggttttataaaaggatccaaatcgataagagctcaacaattgaaaggcctaactcgagaatctagaaagcggccgcaactctagtttgtctgttcgagatcctacagtactagcgggtcagaattc

SEQ ID NO: 230 - DNA, 164 bp, Artificial Sequence
  chemically synthesized
gaattcagacccgcaagtactggaagggatttattacagtgcaagaagaaggatccaaatcgataagagctcaacaattgaaaggcctaactcgagaatctagaaagcggccgcaaggaaaccgaagcaggaaaatccctagcagaactagcgggtcagaattc

SEQ ID NO: 231 - DNA, 164 bp, Artificial Sequence
  chemically synthesized
gaattcagacccgcaagtactgggatgagtattggaaccctgaagaaaaaggatccaaatcgataagagctcaacaattgaaaggcctaactcgagaatctagaaagcggccgcaatctcggaatccgggccgagaacttcgcagtactagcgggtcagaattc

SEQ ID NO: 232 - DNA, 156 bp, Artificial Sequence
  chemically synthesized
gaattcagacccgcaagtactgtggggcagggtgggacctcaggaaggatccaaatcgataagagctcaacaattgaaaggcctaactcgagaatctagaaagcggccgcaacggggcggtgaagaacacccaacagtactagcgggtcagaattc

SEQ ID NO: 233 - DNA, 164 bp, Artificial Sequence
  chemically synthesized
gaattcagacccgcaagttgtggtggaatgccactagaaactagggaaaaggatccaaatcgataagagctcaacaattgaaaggcctaactcgagaatctagaaagcggccgcaagataatcaatatacaaaattccatgacaatactagcgggtcagaattc

SEQ ID NO: 234 - DNA, 136 bp, Artificial Sequence
  chemically synthesized
catatgttggaatagaaatcaactatcatctactaaggatccaaatcgataagagctcaacaattgaaaggcctaactcgagaatctagaaagcggccgcaaacaattatctcaacattcacccatttctcatatg

SEQ ID NO: 235 - DNA, 200 bp, Artificial Sequence
  chemically synthesized
gaattcagagctcttcactatgatcttacccagcaatagtggacacgcggctaagtgagtaaactctcagaaggatccaaatcgataagagctcaacaattgaactcgagaatctagaaagcggccgcaaaaaacaagaacctcgcttaggcctgtgtccatattacgtgggtaggatcactaagaagagctcagaattc

SEQ ID NO: 236 - DNA, 996 bp, Artificial Sequence
  chemically synthesized
gaattcagacccgcaagtactggaagggctaattcactcccaaagaagaaggatccaagctgactatgtgatcttattaaaattaggttaaatttcgaggttaaaaatagttttaatattgctatagtcttagaggtcttgtatatttatacttaccacacaagatggaccggagcagccctccaatatctagtgtaccctcgtgctcgctcaaacattaagtggtgttgtgcgaaaagaatctcacttcaagaaaaagaatttaccatggagaaaaagattactggatacacaaccgtagacatctctcagtggcaccgtaaggaacactttgaagcgtttcagtccgtcgctcagtgcacctacaatcagaccgtgcaattggacatcaccgcgtttttaaaaaccgtgaagaagaacaaacacaaattttaccctgcttttattcacattttggctcgtcttatgaatgctcatcccgaatttcgcatggcaatgaaagacggtgagttggtaatttgggacagcgttcacccgtgttatacggtttttcacgaacagaccgagaccttttcatctttgtggtcggagtaccacgatgattttcgccagtttttacatatctattctcaagatgtcgcgtgttacggagaaaatctggcgtattttccgaaaggttttatcgaaaatatgtttttcgtctctgcgaacccctgggtgtcgtttacctcttttgatcttaatgtggcaaatatggataacttttttgcgccggtattcacgatgggaaagtattatacgcagggagataaggtactgatgccgcttgctattcaagtgcaccatgcagtatgtgacggctttcatgtcggccgcatgttaaatgagttgcaacagtattgtgacgagtggcaagggggagcttaataatctagaaagcggccgcaattttagtcagtgtggaaaatctctagcagtactagcgggtcagaattc

SEQ ID NO: 237 - DNA, 1953 bp, Artificial Sequence
  chemically synthesized
gaattcagacccgcaagtactggaagggctaattcactcccaaagaagaaggatccaagctgactatgtgatcttattaaaattaggttaaatttcgaggttaaaaatagttttaatattgctatagtcttagaggtcttgtatatttatacttaccacacaagatggaccggagcagccctccaatatctagtgtaccctcgtgctcgctcaaacattaagtggtgttgtgcgaaaagaatctcacttcaagaaaaagaatttaccatggtgagcaagggcgaggaggataacatggccatcatcaaggagttcatgcgcttcaaggtgcacatggagggctccgtgaacggccacgagttcgagatcgagggcgagggcgagggccgcccctacgagggcacccagaccgccaagctgaaggtgaccaagggtggccccctgcccttcgcctgggacatcctgtcccctcagttcatgtacggctccaaggcctacgtgaagcaccctgccgacatccccgactacttgaagctgtccttccccgagggcttcaagtgggagcgcgtgatgaacttcgaggacggcggcgtggtgaccgtgacccaggactcctccctgcaggacggcgagttcatctacaaggtgaagctgcgcggcaccaacttcccctccgacggccccgtaatgcagaagaagaccatgggctgggaggcctcctccgagcggatgtaccccgaggacggcgccctgaagggcgagatcaagcagaggctgaagctgaaggacggcggccactacgacgctgaggtcaagaccacctacaaggccaagaagcccgtgcagctgcccggcgcctacaacgtcaacatcaagttggacatcacctcccacaacgaggactacaccatcgtggaacagtacgaacgcgccgagggccgccactccaccggcggcatggacgagctgtacaagggcagcggcgccaccaacttcagcctgctgaagcaggccggcgacgtggaggagaaccctggacctacagaatataagcccaccgttcgactggcgactcgggatgatgtaccaagagcggtacggactttggcagctgcattcgctgattaccctgccaccagacacacagtcgaccccgatcgacatatagagcgagtgacggaactgcaagagctttttctcaccagggttggcctggatataggtaaagtatgggttgcagacgatggagcagccgtagccgtatggacgacaccagagtcagtcgaggccggggccgtctttgccgaaataggccctagaatggcggaacttagcggctctcggctggcggcccagcagcaaatggaggggctcctcgcgcctcatcgcccaaaggaacctgcgtggtttttggctacggtaggggtgtccccggaccatcagggcaagggactggggagcgcagtggtgctgcctggtgtcgaagcggccgagcgagccggtgtccctgccttcttggagaccagcgctccgcgcaaccttccgttctatgagcgcttgggttttacggtcacggccgatgtcgaatgtcccaaggacagagcaacttggtgtatgacaaggaaaccaggtgctcgggaccctccagacctcgataactaataatctagaactatagtgagtcgtattacgtagatccagacatgataagatacattgatgagtttggacaaaccacaactagaatgcagtgaaaaaaatgctttatttgtgaaatttgtgatgctattgctttatttgtaaccattataagctgcaataaacaagttaacaacaacaattgcattcattttatgtttcaggttcagggggaggtgtgggaggttttttaattcgcggccgcaattttagtcagtgtggaaaatctctagcagtactagcgggtcagaattc

SEQ ID NO: 238 - DNA, 62 bp, Artificial Sequence
  chemically synthesized
ccaaatatccggaagatattccggattatgtgaaacagagctttccggaaggctatacctgg

SEQ ID NO: 239 - DNA, 807 bp, Artificial Sequence
  chemically synthesized
atgaccatgattacgccaagctatttaggtgacactatagaatactcaagctatgcatcaagcttggtaccgagctcggatccgaccgggagacggcggacccaggtcggcggtggcagcggtggcggtgggcggccgctcagcgtgattgcgaaacagatgacctataaagtgtatatgagcggcaccgtgaacggccattattttgaagtggaaggcgatggcaaaggcaaaccgtatgaaggcgaacagaccgtgaaactgaccgtgaccaaaggcggcccgctgccgtttgcgtgggatattctgagcccgcagtgccagtatggcagcattccgtttaccaaatatccggaagatattccggattatgtgaaacagagctttccggaaggctatacctgggaacgcattatgaactttgaagatggcgcggtgtgcaccgtgagcaacgatagcagcattcagggcaactgctttatttatcatgtgaaatttagcggcctgaactttccgccgaacggcccggtgatgcagaaaaaaacccagggctgggaaccgaacaccgaacgcctgtttgcgcgcgatggcatgctgctgggcaacaactttatggcgctgaaactggaaggcggcggccattatctgtgcgaatttaaaaccacctataaagcgaaaaaaccggtgaaaatgccgggctatcattatgtggatcgcaaactggatgtgaccaaccataacaaagattataccagcgtggaacagtgcgaaattagcattgcgcgcaaaccggtggtggcgtaataa

SEQ ID NO: 240 - DNA, 60 bp, Artificial Sequence
  chemically synthesized
ccctggtgaaccgcatcgagctgaagggcatcgacttcaaggaggacggcaacatcctgg

SEQ ID NO: 241 - DNA, 747 bp, Artificial Sequence
  chemically synthesized
atggtgagcaagggcgaggagctgttcaccggggtggtgcccatcctggtcgagctggacggcgacgtaaacggccacaagttcagcgtgtccggcgagggcgagggcgatgccacctacggcaagctgaccctgaagttcatctgcaccaccggcaagctgcccgtgccctggcccaccctcgtgaccaccctgacctacggcgtgcagtgcttcagccgctaccccgaccacatgaagcagcacgacttcttcaagtccgccatgcccgaaggctacgtccaggagcgcaccatcttcttcaaggacgacggcaactacaagacccgcgccgaggtgaagttcgagggcgacaccctggtgaaccgcatcgagctgaagggcatcgacttcaaggaggacggcaacatcctggggcacaagctggagtacaactacaacagccacaacgtctatatcatggccgacaagcagaagaacggcatcaaggtgaacttcaagatccgccacaacatcgaggacggcagcgtgcagctcgccgaccactaccagcagaacacccccatcggcgacggccccgtgctgctgcccgacaaccactacctgagcacccagtccgccctgagcaaagaccccaacgagaagcgcgatcacatggtcctgctggagttcgtgaccgccgccgggatcactctcggcatggacgagctgtacaagaggcctctcgagcctctagaactatagtga

SEQ ID NO: 242 - DNA, 62 bp, Artificial Sequence
  chemically synthesized
cctgcagagtctaataccttttatgctttgataattagcagtttgtctacttggtcactagg

SEQ ID NO: 243 - DNA, 20 bp, Artificial Sequence
  chemically synthesized
cggaatatcttccggatatt

SEQ ID NO: 244 - DNA, 20 bp, Artificial Sequence
  chemically synthesized
gctttccggaaggctatacc

SEQ ID NO: 245 - DNA, 20 bp, Artificial Sequence
  chemically synthesized
cagctcgatgcggttcacca

SEQ ID NO: 246 - DNA, 20 bp, Artificial Sequence
  chemically synthesized
caaggaggacggcaacatcc

SEQ ID NO: 247 - DNA, 20 bp, Artificial Sequence
  chemically synthesized
taaaaggtattagactctgc

SEQ ID NO: 248 - DNA, 20 bp, Artificial Sequence
  chemically synthesized
agtttgtctacttggtcact

SEQ ID NO: 249 - protein, 1423 aa, Artificial Sequence
  chemically synthesized
MDYKDHDGDYKDHDIDYKDDDDKMAPKKKRKVGIHGVPAADKKYSIGLDIGTNSVGWAVITDEYKVPSKKFKVLGNTDRHSIKKNLIGALLFDSGETAEATRLKRTARRRYTRRKNRICYLQEIFSNEMAKVDDSFFHRLEESFLVEEDKKHERHPIFGNIVDEVAYHEKYPTIYHLRKKLVDSTDKADLRLIYLALAHMIKFRGHFLIEGDLNPDNSDVDKLFIQLVQTYNQLFEENPINASGVDAKAILSARLSKSRRLENLIAQLPGEKKNGLFGNLIALSLGLTPNFKSNFDLAEDAKLQLSKDTYDDDLDNLLAQIGDQYADLFLAAKNLSDAILLSDILRVNTEITKAPLSASMIKRYDEHHQDLTLLKALVRQQLPEKYKEIFFDQSKNGYAGYIDGGASQEEFYKFIKPILEKMDGTEELLVKLNREDLLRKQRTFDNGSIPHQIHLGELHAILRRQEDFYPFLKDNREKIEKILTFRIPYYVGPLARGNSRFAWMTRKSEETITPWNFEEVVDKGASAQSFIERMTNFDKNLPNEKVLPKHSLLYEYFTVYNELTKVKYVTEGMRKPAFLSGEQKKAIVDLLFKTNRKVTVKQLKEDYFKKIECFDSVEISGVEDRFNASLGTYHDLLKIIKDKDFLDNEENEDILEDIVLTLTLFEDREMIEERLKTYAHLFDDKVMKQLKRRRYTGWGRLSRKLINGIRDKQSGKTILDFLKSDGFANRNFMQLIHDDSLTFKEDIQKAQVSGQGDSLHEHIANLAGSPAIKKGILQTVKVVDELVKVMGRHKPENIVIEMARENQTTQKGQKNSRERMKRIEEGIKELGSQILKEHPVENTQLQNEKLYLYYLQNGRDMYVDQELDINRLSDYDVDHIVPQSFLKDDSIDNKVLTRSDKNRGKSDNVPSEEVVKKMKNYWRQLLNAKLITQRKFDNLTKAERGGLSELDKAGFIKRQLVETRQITKHVAQILDSRMNTKYDENDKLIREVKVITLKSKLVSDFRKDFQFYKVREINNYHHAHDAYLNAVVGTALIKKYPKLESEFVYGDYKVYDVRKMIAKSEQEIGKATAKYFFYSNIMNFFKTEITLANGEIRKRPLIETNGETGEIVWDKGRDFATVRKVLSMPQVNIVKKTEVQTGGFSKESILPKRNSDKLIARKKDWDPKKYGGFDSPTVAYSVLVVAKVEKGKSKKLKSVKELLGITIMERSSFEKNPIDFLEAKGYKEVKKDLIIKLPKYSLFELENGRKRMLASAGELQKGNELALPSKYVNFLYLASHYEKLKGSPEDNEQKQLFVEQHKHYLDEIIEQISEFSKRVILADANLDKVLSAYNKHRDKPIREQAENIIHLFTLTNLGAPAAFKYFDTTIDRKRYTSTKEVLDATLIHQSITGLYETRIDLSQLGGDKRPAATKKAGQAKKKK

SEQ ID NO: 250 - protein, 1448 aa, Artificial Sequence
  chemically synthesized
MDYKDHDGDYKDHDIDYKDDDDKMAPKKKRKVGIHGVPAADKKYSIGLDIGTNSVGWAVITDEYKVPSKKFKVLGNTDRHSIKKNLIGALLFDSGETAEATRLKRTARRRYTRRKNRICYLQEIFSNEMAKVDDSFFHRLEESFLVEEDKKHERHPIFGNIVDEVAYHEKYPTIYHLRKKLVDSTDKADLRLIYLALAHMIKFRGHFLIEGDLNPDNSDVDKLFIQLVQTYNQLFEENPINASGVDAKAILSARLSKSRRLENLIAQLPGEKKNGLFGNLIALSLGLTPNFKSNFDLAEDAKLQLSKDTYDDDLDNLLAQIGDQYADLFLAAKNLSDAILLSDILRVNTEITKAPLSASMIKRYDEHHQDLTLLKALVRQQLPEKYKEIFFDQSKNGYAGYIDGGASQEEFYKFIKPILEKMDGTEELLVKLNREDLLRKQRTFDNGSIPHQIHLGELHAILRRQEDFYPFLKDNREKIEKILTFRIPYYVGPLARGNSRFAWMTRKSEETITPWNFEEVVDKGASAQSFIERMTNFDKNLPNEKVLPKHSLLYEYFTVYNELTKVKYVTEGMRKPAFLSGEQKKAIVDLLFKTNRKVTVKQLKEDYFKKIECFDSVEISGVEDRFNASLGTYHDLLKIIKDKDFLDNEENEDILEDIVLTLTLFEDREMIEERLKTYAHLFDDKVMKQLKRRRYTGWGRLSRKLINGIRDKQSGKTILDFLKSDGFANRNFMQLIHDDSLTFKEDIQKAQVSGQGDSLHEHIANLAGSPAIKKGILQTVKVVDELVKVMGRHKPENIVIEMARENQTTQKGQKNSRERMKRIEEGIKELGSQILKEHPVENTQLQNEKLYLYYLQNGRDMYVDQELDINRLSDYDVDHIVPQSFLKDDSIDNKVLTRSDKNRGKSDNVPSEEVVKKMKNYWRQLLNAKLITQRKFDNLTKAERGGLSELDKAGFIKRQLVETRQITKHVAQILDSRMNTKYDENDKLIREVKVITLKSKLVSDFRKDFQFYKVREINNYHHAHDAYLNAVVGTALIKKYPKLESEFVYGDYKVYDVRKMIAKSEQEIGKATAKYFFYSNIMNFFKTEITLANGEIRKRPLIETNGETGEIVWDKGRDFATVRKVLSMPQVNIVKKTEVQTGGFSKESILPKRNSDKLIARKKDWDPKKYGGFDSPTVAYSVLVVAKVEKGKSKKLKSVKELLGITIMERSSFEKNPIDFLEAKGYKEVKKDLIIKLPKYSLFELENGRKRMLASAGELQKGNELALPSKYVNFLYLASHYEKLKGSPEDNEQKQLFVEQHKHYLDEIIEQISEFSKRVILADANLDKVLSAYNKHRDKPIREQAENIIHLFTLTNLGAPAAFKYFDTTIDRKRYTSTKEVLDATLIHQSITGLYETRIDLSQLGGDGSNSKKRSLEDNETEIKVSRDTWNTKNMRSLEPPRSKKRIH

SEQ ID NO: 251 - protein, 1775 aa, Artificial Sequence
  chemically synthesized
MEQAPEDQGPQREPHNEWTLELLEELKNEAVRHFPRIWLHGLGQHIYETYGDTWAGVEAIIRILQQLLFIHFRIGCRHSRIGVTQQRRARNGASRSLVSAGIRKVLFLDGIDKAQDEHEKYHSNWRAMASDFNLPPVVAKEIVASCDKCQLKGEAMHGQVDCSPGIWQLDCTHLEGKVILVAVHVASGYIEAEVIPAETGQETAYFLLKLAGRWPVKTIHTDNGSNFTGATVRAACWWAGIKQEFGIPYNPQSQGVVESMNKELKKIIGQVRDQAEHLKTAVQMAVFIHNFKRKGGIGGYSAGERIVDIIATDIQTKELQKQITKIQNGGGGSGGGGSGGGGSDKKYSIGLAIGTNSVGWAVITDEYKVPSKKFKVLGNTDRHSIKKNLIGALLFDSGETAEATRLKRTARRRYTRRKNRICYLQEIFSNEMAKVDDSFFHRLEESFLVEEDKKHERHPIFGNIVDEVAYHEKYPTIYHLRKKLVDSTDKADLRLIYLALAHMIKFRGHFLIEGDLNPDNSDVDKLFIQLVQTYNQLFEENPINASGVDAKAILSARLSKSRRLENLIAQLPGEKKNGLFGNLIALSLGLTPNFKSNFDLAEDAKLQLSKDTYDDDLDNLLAQIGDQYADLFLAAKNLSDAILLSDILRVNTEITKAPLSASMIKRYDEHHQDLTLLKALVRQQLPEKYKEIFFDQSKNGYAGYIDGGASQEEFYKFIKPILEKMDGTEELLVKLNREDLLRKQRTFDNGSIPHQIHLGELHAILRRQEDFYPFLKDNREKIEKILTFRIPYYVGPLARGNSRFAWMTRKSEETITPWNFEEVVDKGASAQSFIERMTNFDKNLPNEKVLPKHSLLYEYFTVYNELTKVKYVTEGMRKPAFLSGEQKKAIVDLLFKTNRKVTVKQLKEDYFKKIECFDSVEISGVEDRFNASLGTYHDLLKIIKDKDFLDNEENEDILEDIVLTLTLFEDREMIEERLKTYAHLFDDKVMKQLKRRRYTGWGRLSRKLINGIRDKQSGKTILDFLKSDGFANRNFMQLIHDDSLTFKEDIQKAQVSGQGDSLHEHIANLAGSPAIKKGILQTVKVVDELVKVMGRHKPENIVIEMARENQTTQKGQKNSRERMKRIEEGIKELGSQILKEHPVENTQLQNEKLYLYYLQNGRDMYVDQELDINRLSDYDVDAIVPQSFLKDDSIDNKVLTRSDKNRGKSDNVPSEEVVKKMKNYWRQLLNAKLITQRKFDNLTKAERGGLSELDKAGFIKRQLVETRQITKHVAQILDSRMNTKYDENDKLIREVKVITLKSKLVSDFRKDFQFYKVREINNYHHAHDAYLNAVVGTALIKKYPKLESEFVYGDYKVYDVRKMIAKSEQEIGKATAKYFFYSNIMNFFKTEITLANGEIRKRPLIETNGETGEIVWDKGRDFATVRKVLSMPQVNIVKKTEVQTGGFSKESILPKRNSDKLIARKKDWDPKKYGGFDSPTVAYSVLVVAKVEKGKSKKLKSVKELLGITIMERSSFEKNPIDFLEAKGYKEVKKDLIIKLPKYSLFELENGRKRMLASAGELQKGNELALPSKYVNFLYLASHYEKLKGSPEDNEQKQLFVEQHKHYLDEIIEQISEFSKRVILADANLDKVLSAYNKHRDKPIREQAENIIHLFTLTNLGAPAAFKYFDTTIDRKRYTSTKEVLDATLIHQSITGLYETRIDLSQLGGDGSNSKKRSLEDNETEIKVSRDTWNTKNMRSLEPPRSKKRIHLEDYKDHDGDYKDHDIDYKDDDDK

SEQ ID NO: 252 - protein, 1795 aa, Artificial Sequence
  chemically synthesized
MPKKKRKVSSFLDGIDKAQDEHEKYHSNWRAMASDFNLPPVVAKEIVASCDKCQLKGEAMHGQVDCSPGIWQLDCTHLEGKVILVAVHVASGYIEAEVIPAETGQETAYFLLKLAGRWPVKTIHTDNGSNFTGATVRAACWWAGIKQEFGIPYNPQSQGVVESMNKELKKIIGQVRDQAEHLKTAVQMAVFIHNFKRKGGIGGYSAGERIVDIIATDIQTKELQKQITKIQNGGGGSGGGGSGGGGSDKKYSIGLAIGTNSVGWAVITDEYKVPSKKFKVLGNTDRHSIKKNLIGALLFDSGETAEATRLKRTARRRYTRRKNRICYLQEIFSNEMAKVDDSFFHRLEESFLVEEDKKHERHPIFGNIVDEVAYHEKYPTIYHLRKKLVDSTDKADLRLIYLALAHMIKFRGHFLIEGDLNPDNSDVDKLFIQLVQTYNQLFEENPINASGVDAKAILSARLSKSRRLENLIAQLPGEKKNGLFGNLIALSLGLTPNFKSNFDLAEDAKLQLSKDTYDDDLDNLLAQIGDQYADLFLAAKNLSDAILLSDILRVNTEITKAPLSASMIKRYDEHHQDLTLLKALVRQQLPEKYKEIFFDQSKNGYAGYIDGGASQEEFYKFIKPILEKMDGTEELLVKLNREDLLRKQRTFDNGSIPHQIHLGELHAILRRQEDFYPFLKDNREKIEKILTFRIPYYVGPLARGNSRFAWMTRKSEETITPWNFEEVVDKGASAQSFIERMTNFDKNLPNEKVLPKHSLLYEYFTVYNELTKVKYVTEGMRKPAFLSGEQKKAIVDLLFKTNRKVTVKQLKEDYFKKIECFDSVEISGVEDRFNASLGTYHDLLKIIKDKDFLDNEENEDILEDIVLTLTLFEDREMIEERLKTYAHLFDDKVMKQLKRRRYTGWGRLSRKLINGIRDKQSGKTILDFLKSDGFANRNFMQLIHDDSLTFKEDIQKAQVSGQGDSLHEHIANLAGSPAIKKGILQTVKVVDELVKVMGRHKPENIVIEMARENQTTQKGQKNSRERMKRIEEGIKELGSQILKEHPVENTQLQNEKLYLYYLQNGRDMYVDQELDINRLSDYDVDAIVPQSFLKDDSIDNKVLTRSDKNRGKSDNVPSEEVVKKMKNYWRQLLNAKLITQRKFDNLTKAERGGLSELDKAGFIKRQLVETRQITKHVAQILDSRMNTKYDENDKLIREVKVITLKSKLVSDFRKDFQFYKVREINNYHHAHDAYLNAVVGTALIKKYPKLESEFVYGDYKVYDVRKMIAKSEQEIGKATAKYFFYSNIMNFFKTEITLANGEIRKRPLIETNGETGEIVWDKGRDFATVRKVLSMPQVNIVKKTEVQTGGFSKESILPKRNSDKLIARKKDWDPKKYGGFDSPTVAYSVLVVAKVEKGKSKKLKSVKELLGITIMERSSFEKNPIDFLEAKGYKEVKKDLIIKLPKYSLFELENGRKRMLASAGELQKGNELALPSKYVNFLYLASHYEKLKGSPEDNEQKQLFVEQHKHYLDEIIEQISEFSKRVILADANLDKVLSAYNKHRDKPIREQAENIIHLFTLTNLGAPAAFKYFDTTIDRKRYTSTKEVLDATLIHQSITGLYETRIDLSQLGGDGSNSKKRSLEDNETEIKVSRDTWNTKNMRSLEPPRSKKRIHLEDYKDHDGDYKDHDIDYKDDDDKLVSAGIRKVLFLDGIDKAQDMEQAPEDQGPQREPHNEWTLELLEELKNEAVRHFPRIWLHGLGQHIYETYGDTWAGVEAIIRILQQLLFIHFRIGCRHSRIGVTQQRRARNGASRS

SEQ ID NO: 253 - protein, 96 aa, Artificial Sequence
  chemically synthesized
MEQAPEDQGPQREPHNEWTLELLEELKNEAVRHFPRIWLHGLGQHIYETYGDTWAGVEAIIRILQQLLFIHFRIGCRHSRIGVTQQRRARNGASRS

SEQ ID NO: 254 - protein, 39 aa, Artificial Sequence
  chemically synthesized
KSKKRSLEDNETEIEVSRDTWNNKNMRSLEPPRSKKRIN

SEQ ID NO: 255 - protein, 33 aa, Artificial Sequence
  chemically synthesized
NVKKRKRRSKKINKLTDGQIRINHVSSEKKRRE

SEQ ID NO: 256 - protein, 43 aa, Artificial Sequence
  chemically synthesized
TMKKRDAETADIGDQSEVESDTEELKKIMFGEKKKLNKKKRKQ

SEQ ID NO: 257 - protein, 37 aa, Artificial Sequence
  chemically synthesized
RQKKRVYYDDGLTEEQFLEAVEDDNMSLEDAIKKRRE

SEQ ID NO: 258 - DNA, 4272 bp, Artificial Sequence
  chemically synthesized
atggactataaggaccacgacggagactacaaggatcatgatattgattacaaagacgatgacgataagatggccccaaagaagaagcggaaggtcggtatccacggagtcccagcagccgacaagaagtacagcatcggcctggacatcggcaccaactctgtgggctgggccgtgatcaccgacgagtacaaggtgcccagcaagaaattcaaggtgctgggcaacaccgaccggcacagcatcaagaagaacctgatcggagccctgctgttcgacagcggcgaaacagccgaggccacccggctgaagagaaccgccagaagaagatacaccagacggaagaaccggatctgctatctgcaagagatcttcagcaacgagatggccaaggtggacgacagcttcttccacagactggaagagtccttcctggtggaagaggataagaagcacgagcggcaccccatcttcggcaacatcgtggacgaggtggcctaccacgagaagtaccccaccatctaccacctgagaaagaaactggtggacagcaccgacaaggccgacctgcggctgatctatctggccctggcccacatgatcaagttccggggccacttcctgatcgagggcgacctgaaccccgacaacagcgacgtggacaagctgttcatccagctggtgcagacctacaaccagctgttcgaggaaaaccccatcaacgccagcggcgtggacgccaaggccatcctgtctgccagactgagcaagagcagacggctggaaaatctgatcgcccagctgcccggcgagaagaagaatggcctgttcggaaacctgattgccctgagcctgggcctgacccccaacttcaagagcaacttcgacctggccgaggatgccaaactgcagctgagcaaggacacctacgacgacgacctggacaacctgctggcccagatcggcgaccagtacgccgacctgtttctggccgccaagaacctgtccgacgccatcctgctgagcgacatcctgagagtgaacaccgagatcaccaaggcccccctgagcgcctctatgatcaagagatacgacgagcaccaccaggacctgaccctgctgaaagctctcgtgcggcagcagctgcctgagaagtacaaagagattttcttcgaccagagcaagaacggctacgccggctacattgacggcggagccagccaggaagagttctacaagttcatcaagcccatcctggaaaagatggacggcaccgaggaactgctcgtgaagctgaacagagaggacctgctgcggaagcagcggaccttcgacaacggcagcatcccccaccagatccacctgggagagctgcacgccattctgcggcggcaggaagatttttacccattcctgaaggacaaccgggaaaagatcgagaagatcctgaccttccgcatcccctactacgtgggccctctggccaggggaaacagcagattcgcctggatgaccagaaagagcgaggaaaccatcaccccctggaacttcgaggaagtggtggacaagggcgcttccgcccagagcttcatcgagcggatgaccaacttcgataagaacctgcccaacgagaaggtgctgcccaagcacagcctgctgtacgagtacttcaccgtgtataacgagctgaccaaagtgaaatacgtgaccgagggaatgagaaagcccgccttcctgagcggcgagcagaaaaaggccatcgtggacctgctgttcaagaccaaccggaaagtgaccgtgaagcagctgaaagaggactacttcaagaaaatcgagtgcttcgactccgtggaaatctccggcgtggaagatcggttcaacgcctccctgggcacataccacgatctgctgaaaattatcaaggacaaggacttcctggacaatgaggaaaacgaggacattctggaagatatcgtgctgaccctgacactgtttgaggacagagagatgatcgaggaacggctgaaaacctatgcccacctgttcgacgacaaagtgatgaagcagctgaagcggcggagatacaccggctggggcaggctgagccggaagctgatcaacggcatccgggacaagcagtccggcaagacaatcctggatttcctgaagtccgacggcttcgccaacagaaacttcatgcagctgatccacgacgacagcctgacctttaaagaggacatccagaaagcccaggtgtccggccagggcgatagcctgcacgagcacattgccaatctggccggcagccccgccattaagaagggcatcctgcagacagtgaaggtggtggacgagctcgtgaaagtgatgggccggcacaagcccgagaacatcgtgatcgaaatggccagagagaaccagaccacccagaagggacagaagaacagccgcgagagaatgaagcggatcgaagagggcatcaaagagctgggcagccagatcctgaaagaacaccccgtggaaaacacccagctgcagaacgagaagctgtacctgtactacctgcagaatgggcgggatatgtacgtggaccaggaactggacatcaaccggctgtccgactacgatgtggaccatatcgtgcctcagagctttctgaaggacgactccatcgacaacaaggtgctgaccagaagcgacaagaaccggggcaagagcgacaacgtgccctccgaagaggtcgtgaagaagatgaagaactactggcggcagctgctgaacgccaagctgattacccagagaaagttcgacaatctgaccaaggccgagagaggcggcctgagcgaactggataaggccggcttcatcaagagacagctggtggaaacccggcagatcacaaagcacgtggcacagatcctggactcccggatgaacactaagtacgacgagaatgacaagctgatccgggaagtgaaagtgatcaccctgaagtccaagctggtgtccgatttccggaaggatttccagttttacaaagtgcgcgagatcaacaactaccaccacgcccacgacgcctacctgaacgccgtcgtgggaaccgccctgatcaaaaagtaccctaagctggaaagcgagttcgtgtacggcgactacaaggtgtacgacgtgcggaagatgatcgccaagagcgagcaggaaatcggcaaggctaccgccaagtacttcttctacagcaacatcatgaactttttcaagaccgagattaccctggccaacggcgagatccggaagcggcctctgatcgagacaaacggcgaaaccggggagatcgtgtgggataagggccgggattttgccaccgtgcggaaagtgctgagcatgccccaagtgaatatcgtgaaaaagaccgaggtgcagacaggcggcttcagcaaagagtctatcctgcccaagaggaacagcgataagctgatcgccagaaagaaggactgggaccctaagaagtacggcggcttcgacagccccaccgtggcctattctgtgctggtggtggccaaagtggaaaagggcaagtccaagaaactgaagagtgtgaaagagctgctggggatcaccatcatggaaagaagcagcttcgagaagaatcccatcgactttctggaagccaagggctacaaagaagtgaaaaaggacctgatcatcaagctgcctaagtactccctgttcgagctggaaaacggccggaagagaatgctggcctctgccggcgaactgcagaagggaaacgaactggccctgccctccaaatatgtgaacttcctgtacctggccagccactatgagaagctgaagggctcccccgaggataatgagcagaaacagctgtttgtggaacagcacaagcactacctggacgagatcatcgagcagatcagcgagttctccaagagagtgatcctggccgacgctaatctggacaaagtgctgtccgcctacaacaagcaccgggataagcccatcagagagcaggccgagaatatcatccacctgtttaccctgaccaatctgggagcccctgccgccttcaagtactttgacaccaccatcgaccggaagaggtacaccagcaccaaagaggtgctggacgccaccctgatccaccagagcatcaccggcctgtacgagacacggatcgacctgtctcagctgggaggcgacaaaaggccggcggccacgaaaaaggccggccaggcaaaaaagaaaaagtaa

SEQ ID NO: 259 - DNA, 4347 bp, Artificial Sequence
  chemically synthesized
atggactataaggaccacgacggagactacaaggatcatgatattgattacaaagacgatgacgataagatggccccaaagaagaagcggaaggtcggtatccacggagtcccagcagccgacaagaagtacagcatcggcctggacatcggcaccaactctgtgggctgggccgtgatcaccgacgagtacaaggtgcccagcaagaaattcaaggtgctgggcaacaccgaccggcacagcatcaagaagaacctgatcggagccctgctgttcgacagcggcgaaacagccgaggccacccggctgaagagaaccgccagaagaagatacaccagacggaagaaccggatctgctatctgcaagagatcttcagcaacgagatggccaaggtggacgacagcttcttccacagactggaagagtccttcctggtggaagaggataagaagcacgagcggcaccccatcttcggcaacatcgtggacgaggtggcctaccacgagaagtaccccaccatctaccacctgagaaagaaactggtggacagcaccgacaaggccgacctgcggctgatctatctggccctggcccacatgatcaagttccggggccacttcctgatcgagggcgacctgaaccccgacaacagcgacgtggacaagctgttcatccagctggtgcagacctacaaccagctgttcgaggaaaaccccatcaacgccagcggcgtggacgccaaggccatcctgtctgccagactgagcaagagcagacggctggaaaatctgatcgcccagctgcccggcgagaagaagaatggcctgttcggaaacctgattgccctgagcctgggcctgacccccaacttcaagagcaacttcgacctggccgaggatgccaaactgcagctgagcaaggacacctacgacgacgacctggacaacctgctggcccagatcggcgaccagtacgccgacctgtttctggccgccaagaacctgtccgacgccatcctgctgagcgacatcctgagagtgaacaccgagatcaccaaggcccccctgagcgcctctatgatcaagagatacgacgagcaccaccaggacctgaccctgctgaaagctctcgtgcggcagcagctgcctgagaagtacaaagagattttcttcgaccagagcaagaacggctacgccggctacattgacggcggagccagccaggaagagttctacaagttcatcaagcccatcctggaaaagatggacggcaccgaggaactgctcgtgaagctgaacagagaggacctgctgcggaagcagcggaccttcgacaacggcagcatcccccaccagatccacctgggagagctgcacgccattctgcggcggcaggaagatttttacccattcctgaaggacaaccgggaaaagatcgagaagatcctgaccttccgcatcccctactacgtgggccctctggccaggggaaacagcagattcgcctggatgaccagaaagagcgaggaaaccatcaccccctggaacttcgaggaagtggtggacaagggcgcttccgcccagagcttcatcgagcggatgaccaacttcgataagaacctgcccaacgagaaggtgctgcccaagcacagcctgctgtacgagtacttcaccgtgtataacgagctgaccaaagtgaaatacgtgaccgagggaatgagaaagcccgccttcctgagcggcgagcagaaaaaggccatcgtggacctgctgttcaagaccaaccggaaagtgaccgtgaagcagctgaaagaggactacttcaagaaaatcgagtgcttcgactccgtggaaatctccggcgtggaagatcggttcaacgcctccctgggcacataccacgatctgctgaaaattatcaaggacaaggacttcctggacaatgaggaaaacgaggacattctggaagatatcgtgctgaccctgacactgtttgaggacagagagatgatcgaggaacggctgaaaacctatgcccacctgttcgacgacaaagtgatgaagcagctgaagcggcggagatacaccggctggggcaggctgagccggaagctgatcaacggcatccgggacaagcagtccggcaagacaatcctggatttcctgaagtccgacggcttcgccaacagaaacttcatgcagctgatccacgacgacagcctgacctttaaagaggacatccagaaagcccaggtgtccggccagggcgatagcctgcacgagcacattgccaatctggccggcagccccgccattaagaagggcatcctgcagacagtgaaggtggtggacgagctcgtgaaagtgatgggccggcacaagcccgagaacatcgtgatcgaaatggccagagagaaccagaccacccagaagggacagaagaacagccgcgagagaatgaagcggatcgaagagggcatcaaagagctgggcagccagatcctgaaagaacaccccgtggaaaacacccagctgcagaacgagaagctgtacctgtactacctgcagaatgggcgggatatgtacgtggaccaggaactggacatcaaccggctgtccgactacgatgtggaccatatcgtgcctcagagctttctgaaggacgactccatcgacaacaaggtgctgaccagaagcgacaagaaccggggcaagagcgacaacgtgccctccgaagaggtcgtgaagaagatgaagaactactggcggcagctgctgaacgccaagctgattacccagagaaagttcgacaatctgaccaaggccgagagaggcggcctgagcgaactggataaggccggcttcatcaagagacagctggtggaaacccggcagatcacaaagcacgtggcacagatcctggactcccggatgaacactaagtacgacgagaatgacaagctgatccgggaagtgaaagtgatcaccctgaagtccaagctggtgtccgatttccggaaggatttccagttttacaaagtgcgcgagatcaacaactaccaccacgcccacgacgcctacctgaacgccgtcgtgggaaccgccctgatcaaaaagtaccctaagctggaaagcgagttcgtgtacggcgactacaaggtgtacgacgtgcggaagatgatcgccaagagcgagcaggaaatcggcaaggctaccgccaagtacttcttctacagcaacatcatgaactttttcaagaccgagattaccctggccaacggcgagatccggaagcggcctctgatcgagacaaacggcgaaaccggggagatcgtgtgggataagggccgggattttgccaccgtgcggaaagtgctgagcatgccccaagtgaatatcgtgaaaaagaccgaggtgcagacaggcggcttcagcaaagagtctatcctgcccaagaggaacagcgataagctgatcgccagaaagaaggactgggaccctaagaagtacggcggcttcgacagccccaccgtggcctattctgtgctggtggtggccaaagtggaaaagggcaagtccaagaaactgaagagtgtgaaagagctgctggggatcaccatcatggaaagaagcagcttcgagaagaatcccatcgactttctggaagccaagggctacaaagaagtgaaaaaggacctgatcatcaagctgcctaagtactccctgttcgagctggaaaacggccggaagagaatgctggcctctgccggcgaactgcagaagggaaacgaactggccctgccctccaaatatgtgaacttcctgtacctggccagccactatgagaagctgaagggctcccccgaggataatgagcagaaacagctgtttgtggaacagcacaagcactacctggacgagatcatcgagcagatcagcgagttctccaagagagtgatcctggccgacgctaatctggacaaagtgctgtccgcctacaacaagcaccgggataagcccatcagagagcaggccgagaatatcatccacctgtttaccctgaccaatctgggagcccctgccgccttcaagtactttgacaccaccatcgaccggaagaggtacaccagcaccaaagaggtgctggacgccaccctgatccaccagagcatcaccggcctgtacgagacacggatcgacctgtctcagctgggaggcgacggatccaactcaaagaaaaggtcactggaggacaacgaaacggaaatcaaagtctccagagacacctggaacactaagaacatgcggtccctggaaccgccacgaagcaagaaacggatacattag

SEQ ID NO: 260 - DNA, 5328 bp, Artificial Sequence
  chemically synthesized
atggaacaggctccagaagaccagggtcctcaaagggagccccacaacgaatggactttggagcttctggaggaactgaagaacgaagcagttagacattttccccgcatttggttgcatggattgggccaacacatatatgagacctacggggacacttgggccggtgttgaagcaattatacgcatcctccaacaactcttgttcatacattttaggataggctgccgacatagtcgaatcggtgtcacgcaacaacggcgggcacggaacggggcatcccgatcattggtttctgccggaatcagaaaggtgctttttttggacggtattgacaaagctcaggacgaacatgaaaagtaccactctaactggagagctatggcctccgattttaatcttccgccggtggtagcgaaagaaatcgttgccagttgcgacaaatgccaattgaagggagaagccatgcatggtcaagtggattgttcccccggaatatggcaactcgattgcacgcatctggaaggcaaggtcatcctcgtagcggtacatgttgcttctggatatattgaggccgaggttataccggcagaaacgggccaagaaacagcgtactttctcctgaagcttgcgggacgctggcctgtgaaaacgattcataccgacaacggttctaactttaccggagcaacagtacgggccgcatgctggtgggccggtataaagcaggaatttgggattccatacaatccgcaaagtcaaggtgtcgtcgagtctatgaataaggaactcaaaaagataattggtcaggttagagatcaagccgaacatctcaagacggcggtccaaatggcagtttttattcacaactttaagaggaaaggtgggattggtggctattcagcaggggagcgaatagtggacataatagcaaccgacatacagactaaggagttgcaaaagcagatcacaaagattcaaaatgggggcgggggaagcggcggtggaggtagtggagggggaggatcagataaaaagtattctattggtttagccatcggcactaattccgttggatgggctgtcataaccgatgaatacaaagtaccttcaaagaaatttaaggtgttggggaacacagaccgtcattcgattaaaaagaatcttatcggtgccctcctattcgatagtggcgaaacggcagaggcgactcgcctgaaacgaaccgctcggagaaggtatacacgtcgcaagaaccgaatatgttacttacaagaaatttttagcaatgagatggccaaagttgacgattctttctttcaccgtttggaagagtccttccttgtcgaagaggacaagaaacatgaacggcaccccatctttggaaacatagtagatgaggtggcatatcatgaaaagtacccaacgatttatcacctcagaaaaaagctagttgactcaactgataaagcggacctgaggttaatctacttggctcttgcccatatgataaagttccgtgggcactttctcattgagggtgatctaaatccggacaactcggatgtcgacaaactgttcatccagttagtacaaacctataatcagttgtttgaagagaaccctataaatgcaagtggcgtggatgcgaaggctattcttagcgcccgcctctctaaatcccgacggctagaaaacctgatcgcacaattacccggagagaagaaaaatgggttgttcggtaaccttatagcgctctcactaggcctgacaccaaattttaagtcgaacttcgacttagctgaagatgccaaattgcagcttagtaaggacacgtacgatgacgatctcgacaatctactggcacaaattggagatcagtatgcggacttatttttggctgccaaaaaccttagcgatgcaatcctcctatctgacatactgagagttaatactgagattaccaaggcgccgttatccgcttcaatgatcaaaaggtacgatgaacatcaccaagacttgacacttctcaaggccctagtccgtcagcaactgcctgagaaatataaggaaatattctttgatcagtcgaaaaacgggtacgcaggttatattgacggcggagcgagtcaagaggaattctacaagtttatcaaacccatattagagaagatggatgggacggaagagttgcttgtaaaactcaatcgcgaagatctactgcgaaagcagcggactttcgacaacggtagcattccacatcaaatccacttaggcgaattgcatgctatacttagaaggcaggaggatttttatccgttcctcaaagacaatcgtgaaaagattgagaaaatcctaacctttcgcataccttactatgtgggacccctggcccgagggaactctcggttcgcatggatgacaagaaagtccgaagaaacgattactccatggaattttgaggaagttgtcgataaaggtgcgtcagctcaatcgttcatcgagaggatgaccaactttgacaagaatttaccgaacgaaaaagtattgcctaagcacagtttactttacgagtatttcacagtgtacaatgaactcacgaaagttaagtatgtcactgagggcatgcgtaaacccgcctttctaagcggagaacagaagaaagcaatagtagatctgttattcaagaccaaccgcaaagtgacagttaagcaattgaaagaggactactttaagaaaattgaatgcttcgattctgtcgagatctccggggtagaagatcgatttaatgcgtcacttggtacgtatcatgacctcctaaagataattaaagataaggacttcctggataacgaagagaatgaagatatcttagaagatatagtgttgactcttaccctctttgaagatcgggaaatgattgaggaaagactaaaaacatacgctcacctgttcgacgataaggttatgaaacagttaaagaggcgtcgctatacgggctggggacgattgtcgcggaaacttatcaacgggataagagacaagcaaagtggtaaaactattctcgattttctaaagagcgacggcttcgccaataggaactttatgcagctgatccatgatgactctttaaccttcaaagaggatatacaaaaggcacaggtttccggacaaggggactcattgcacgaacatattgcgaatcttgctggttcgccagccatcaaaaagggcatactccagacagtcaaagtagtggatgagctagttaaggtcatgggacgtcacaaaccggaaaacattgtaatcgagatggcacgcgaaaatcaaacgactcagaaggggcaaaaaaacagtcgagagcggatgaagagaatagaagagggtattaaagaactgggcagccagatcttaaaggagcatcctgtggaaaatacccaattgcagaacgagaaactttacctctattacctacaaaatggaagggacatgtatgttgatcaggaactggacataaaccgtttatctgattacgacgtcgatgccattgtaccccaatcctttttgaaggacgattcaatcgacaataaagtgcttacacgctcggataagaaccgagggaaaagtgacaatgttccaagcgaggaagtcgtaaagaaaatgaagaactattggcggcagctcctaaatgcgaaactgataacgcaaagaaagttcgataacttaactaaagctgagaggggtggcttgtctgaacttgacaaggccggatttattaaacgtcagctcgtggaaacccgccaaatcacaaagcatgttgcacagatactagattcccgaatgaatacgaaatacgacgagaacgataagctgattcgggaagtcaaagtaatcactttaaagtcaaaattggtgtcggacttcagaaaggattttcaattctataaagttagggagataaataactaccaccatgcgcacgacgcttatcttaatgccgtcgtagggaccgcactcattaagaaatacccgaagctagaaagtgagtttgtgtatggtgattacaaagtttatgacgtccgtaagatgatcgcgaaaagcgaacaggagataggcaaggctacagccaaatacttcttttattctaacattatgaatttctttaagacggaaatcactctggcaaacggagagatacgcaaacgacctttaattgaaaccaatggggagacaggtgaaatcgtatgggataagggccgggacttcgcgacggtgagaaaagttttgtccatgccccaagtcaacatagtaaagaaaactgaggtgcagaccggagggttttcaaaggaatcgattcttccaaaaaggaatagtgataagctcatcgctcgtaaaaaggactgggacccgaaaaagtacggtggcttcgatagccctacagttgcctattctgtcctagtagtggcaaaagttgagaagggaaaatccaagaaactgaagtcagtcaaagaattattggggataacgattatggagcgctcgtcttttgaaaagaaccccatcgacttccttgaggcgaaaggttacaaggaagtaaaaaaggatctcataattaaactaccaaagtatagtctgtttgagttagaaaatggccgaaaacggatgttggctagcgccggagagcttcaaaaggggaacgaactcgcactaccgtctaaatacgtgaatttcctgtatttagcgtcccattacgagaagttgaaaggttcacctgaagataacgaacagaagcaactttttgttgagcagcacaaacattatctcgacgaaatcatagagcaaatttcggaattcagtaagagagtcatcctagctgatgccaatctggacaaagtattaagcgcatacaacaagcacagggataaacccatacgtgagcaggcggaaaatattatccatttgtttactcttaccaacctcggcgctccagccgcattcaagtattttgacacaacgatagatcgcaaacgatacacttctaccaaggaggtgctagacgcgacactgattcaccaatccatcacgggattatatgaaactcggatagatttgtcacagcttgggggtgacggatccaactcaaagaaaaggtcactggaggacaacgaaacggaaatcaaagtctccagagacacctggaacactaagaacatgcggtccctggaaccgccacgaagcaagaaacggatacatctcgaggactacaaagaccatgacggtgattataaagatcatgacatcgattacaaggatgacgatgacaagtaa

SEQ ID NO: 261 - DNA, 5388 bp, Artificial Sequence
  chemically synthesized
atgcccaaaaagaagaggaaagtcagctcttttttggacggtattgacaaagctcaggacgaacatgaaaagtaccactctaactggagagctatggcctccgattttaatcttccgccggtggtagcgaaagaaatcgttgccagttgcgacaaatgccaattgaagggagaagccatgcatggtcaagtggattgttcccccggaatatggcaactcgattgcacgcatctggaaggcaaggtcatcctcgtagcggtacatgttgcttctggatatattgaggccgaggttataccggcagaaacgggccaagaaacagcgtactttctcctgaagcttgcgggacgctggcctgtgaaaacgattcataccgacaacggttctaactttaccggagcaacagtacgggccgcatgctggtgggccggtataaagcaggaatttgggattccatacaatccgcaaagtcaaggtgtcgtcgagtctatgaataaggaactcaaaaagataattggtcaggttagagatcaagccgaacatctcaagacggcggtccaaatggcagtttttattcacaactttaagaggaaaggtgggattggtggctattcagcaggggagcgaatagtggacataatagcaaccgacatacagactaaggagttgcaaaagcagatcacaaagattcaaaatgggggcgggggaagcggcggtggaggtagtggagggggaggatcagataaaaagtattctattggtttagccatcggcactaattccgttggatgggctgtcataaccgatgaatacaaagtaccttcaaagaaatttaaggtgttggggaacacagaccgtcattcgattaaaaagaatcttatcggtgccctcctattcgatagtggcgaaacggcagaggcgactcgcctgaaacgaaccgctcggagaaggtatacacgtcgcaagaaccgaatatgttacttacaagaaatttttagcaatgagatggccaaagttgacgattctttctttcaccgtttggaagagtccttccttgtcgaagaggacaagaaacatgaacggcaccccatctttggaaacatagtagatgaggtggcatatcatgaaaagtacccaacgatttatcacctcagaaaaaagctagttgactcaactgataaagcggacctgaggttaatctacttggctcttgcccatatgataaagttccgtgggcactttctcattgagggtgatctaaatccggacaactcggatgtcgacaaactgttcatccagttagtacaaacctataatcagttgtttgaagagaaccctataaatgcaagtggcgtggatgcgaaggctattcttagcgcccgcctctctaaatcccgacggctagaaaacctgatcgcacaattacccggagagaagaaaaatgggttgttcggtaaccttatagcgctctcactaggcctgacaccaaattttaagtcgaacttcgacttagctgaagatgccaaattgcagcttagtaaggacacgtacgatgacgatctcgacaatctactggcacaaattggagatcagtatgcggacttatttttggctgccaaaaaccttagcgatgcaatcctcctatctgacatactgagagttaatactgagattaccaaggcgccgttatccgcttcaatgatcaaaaggtacgatgaacatcaccaagacttgacacttctcaaggccctagtccgtcagcaactgcctgagaaatataaggaaatattctttgatcagtcgaaaaacgggtacgcaggttatattgacggcggagcgagtcaagaggaattctacaagtttatcaaacccatattagagaagatggatgggacggaagagttgcttgtaaaactcaatcgcgaagatctactgcgaaagcagcggactttcgacaacggtagcattccacatcaaatccacttaggcgaattgcatgctatacttagaaggcaggaggatttttatccgttcctcaaagacaatcgtgaaaagattgagaaaatcctaacctttcgcataccttactatgtgggacccctggcccgagggaactctcggttcgcatggatgacaagaaagtccgaagaaacgattactccatggaattttgaggaagttgtcgataaaggtgcgtcagctcaatcgttcatcgagaggatgaccaactttgacaagaatttaccgaacgaaaaagtattgcctaagcacagtttactttacgagtatttcacagtgtacaatgaactcacgaaagttaagtatgtcactgagggcatgcgtaaacccgcctttctaagcggagaacagaagaaagcaatagtagatctgttattcaagaccaaccgcaaagtgacagttaagcaattgaaagaggactactttaagaaaattgaatgcttcgattctgtcgagatctccggggtagaagatcgatttaatgcgtcacttggtacgtatcatgacctcctaaagataattaaagataaggacttcctggataacgaagagaatgaagatatcttagaagatatagtgttgactcttaccctctttgaagatcgggaaatgattgaggaaagactaaaaacatacgctcacctgttcgacgataaggttatgaaacagttaaagaggcgtcgctatacgggctggggacgattgtcgcggaaacttatcaacgggataagagacaagcaaagtggtaaaactattctcgattttctaaagagcgacggcttcgccaataggaactttatgcagctgatccatgatgactctttaaccttcaaagaggatatacaaaaggcacaggtttccggacaaggggactcattgcacgaacatattgcgaatcttgctggttcgccagccatcaaaaagggcatactccagacagtcaaagtagtggatgagctagttaaggtcatgggacgtcacaaaccggaaaacattgtaatcgagatggcacgcgaaaatcaaacgactcagaaggggcaaaaaaacagtcgagagcggatgaagagaatagaagagggtattaaagaactgggcagccagatcttaaaggagcatcctgtggaaaatacccaattgcagaacgagaaactttacctctattacctacaaaatggaagggacatgtatgttgatcaggaactggacataaaccgtttatctgattacgacgtcgatgccattgtaccccaatcctttttgaaggacgattcaatcgacaataaagtgcttacacgctcggataagaaccgagggaaaagtgacaatgttccaagcgaggaagtcgtaaagaaaatgaagaactattggcggcagctcctaaatgcgaaactgataacgcaaagaaagttcgataacttaactaaagctgagaggggtggcttgtctgaacttgacaaggccggatttattaaacgtcagctcgtggaaacccgccaaatcacaaagcatgttgcacagatactagattcccgaatgaatacgaaatacgacgagaacgataagctgattcgggaagtcaaagtaatcactttaaagtcaaaattggtgtcggacttcagaaaggattttcaattctataaagttagggagataaataactaccaccatgcgcacgacgcttatcttaatgccgtcgtagggaccgcactcattaagaaatacccgaagctagaaagtgagtttgtgtatggtgattacaaagtttatgacgtccgtaagatgatcgcgaaaagcgaacaggagataggcaaggctacagccaaatacttcttttattctaacattatgaatttctttaagacggaaatcactctggcaaacggagagatacgcaaacgacctttaattgaaaccaatggggagacaggtgaaatcgtatgggataagggccgggacttcgcgacggtgagaaaagttttgtccatgccccaagtcaacatagtaaagaaaactgaggtgcagaccggagggttttcaaaggaatcgattcttccaaaaaggaatagtgataagctcatcgctcgtaaaaaggactgggacccgaaaaagtacggtggcttcgatagccctacagttgcctattctgtcctagtagtggcaaaagttgagaagggaaaatccaagaaactgaagtcagtcaaagaattattggggataacgattatggagcgctcgtcttttgaaaagaaccccatcgacttccttgaggcgaaaggttacaaggaagtaaaaaaggatctcataattaaactaccaaagtatagtctgtttgagttagaaaatggccgaaaacggatgttggctagcgccggagagcttcaaaaggggaacgaactcgcactaccgtctaaatacgtgaatttcctgtatttagcgtcccattacgagaagttgaaaggttcacctgaagataacgaacagaagcaactttttgttgagcagcacaaacattatctcgacgaaatcatagagcaaatttcggaattcagtaagagagtcatcctagctgatgccaatctggacaaagtattaagcgcatacaacaagcacagggataaacccatacgtgagcaggcggaaaatattatccatttgtttactcttaccaacctcggcgctccagccgcattcaagtattttgacacaacgatagatcgcaaacgatacacttctaccaaggaggtgctagacgcgacactgattcaccaatccatcacgggattatatgaaactcggatagatttgtcacagcttgggggtgacggatccaactcaaagaaaaggtcactggaggacaacgaaacggaaatcaaagtctccagagacacctggaacactaagaacatgcggtccctggaaccgccacgaagcaagaaacggatacatctcgaggactacaaagaccatgacggtgattataaagatcatgacatcgattacaaggatgacgatgacaagttggtttctgccggaatcagaaaggtgctttttttggacggtattgacaaagctcaggacatggaacaggctccagaagaccagggtcctcaaagggagccccacaacgaatggactttggagcttctggaggaactgaagaacgaagcagttagacattttccccgcatttggttgcatggattgggccaacacatatatgagacctacggggacacttgggccggtgttgaagcaattatacgcatcctccaacaactcttgttcatacattttaggataggctgccgacatagtcgaatcggtgtcacgcaacaacggcgggcacggaacggggcatcccgatcataa

SEQ ID NO: 262 - DNA, 286 bp, Artificial Sequence
  chemically synthesized
ggaacaggctccagaagaccagggtcctcaaagggagccccacaacgaatggactttggagcttctggaggaactgaagaacgaagcagttagacattttccccgcatttggttgcatggattgggccaacacatatatgagacctacggggacacttgggccggtgttgaagcaattatacgcatcctccaacaactcttgttcatacattttaggataggctgccgacatagtcgaatcggtgtcacgcaacaacggcgggcacggaacggggcatcccgatca

SEQ ID NO: 263 - DNA, 1790 bp, Artificial Sequence
  chemically synthesized
atggagcaaaagccaccggtaaagaaagtcaggttgctaggaggtccggcggaggcagcggaggcggaggcagcggcgccaccaacttcagcctgctgaagcaggccggcgacgtggaggagaaccctggacctctcgaggaagacgccaaaaacataaagaaaggcccggcgccattctatccgctggaagatggaaccgctggagagcaactgcataaggctatgaagagatacgccctggttcctggaacaattgcttttacagatgcacatatcgaggtggacatcacttacgctgagtacttcgaaatgtccgttcggttggcagaagctatgaaacgatatgggctgaatacaaatcacagaatcgtcgtatgcagtgaaaactctcttcaattctttatgccggtgttgggcgcgttatttatcggagttgcagttgcgcccgcgaacgacatttataatgaacgtgaattgctcaacagtatgggcatttcgcagcctaccgtggtgttcgtttccaaaaaggggttgcaaaaaattttgaacgtgcaaaaaaagctcccaatcatccaaaaaattattatcatggattctaaaacggattaccagggatttcagtcgatgtacacgttcgtcacatctcatctacctcccggttttaatgaatacgattttgtgccagagtccttcgatagggacaagacaattgcactgatcatgaactcctctggatctactggtctgcctaaaggtgtcgctctgcctcatagaactgcctgcgtgagattctcgcatgccagagatcctatttttggcaatcaaatcattccggatactgcgattttaagtgttgttccattccatcacggttttggaatgtttactacactcggatatttgatatgtggatttcgagtcgtcttaatgtatagatttgaagaagagctgtttctgaggagccttcaggattacaagattcaaagtgcgctgctggtgccaaccctattctccttcttcgccaaaagcactctgattgacaaatacgatttatctaatttacacgaaattgcttctggtggcgctcccctctctaaggaagtcggggaagcggttgccaagaggttccatctgccaggtatcaggcaaggatatgggctcactgagactacatcagctattctgattacacccgagggggatgataaaccgggcgcggtcggtaaagttgttccattttttgaagcgaaggttgtggatctggataccgggaaaacgctgggcgttaatcaaagaggcgaactgtgtgtgagaggtcctatgattatgtccggttatgtaaacaatccggaagcgaccaacgccttgattgacaaggatggatggctacattctggagacatagcttactgggacgaagacgaacacttcttcatcgttgaccgcctgaagtctctgattaagtacaaaggctatcaggtggctcccgctgaattggaatccatcttgctccaacaccccaacatcttcgacgcaggtgtcgcaggtcttcccgacgatgacgccggtgaacttcccgccgccgttgttgttttggagcacggaaagacgatgacggaaaaagagatcgtggattacgtcgccagtcaagtaacaaccgcgaaaaagttgcgcggaggagttgtgtttgtggacgaagtaccgaaaggtcttaccggaaaactcgacgcaagaaaaatcagagagatcctcataaaggccaagaagggcggaaagatcgccgtgtaa

SEQ ID NO: 264 - DNA, 5070 bp, Artificial Sequence
  chemically synthesized
gacattgattattgactagttattaatagtaatcaattacggggtcattagttcatagcccatatatggagttccgcgttacataacttacggtaaatggcccgcctggctgaccgcccaacgacccccgcccattgacgtcaataatgacgtatgttcccatagtaacgccaatagggactttccattgacgtcaatgggtggagtatttacggtaaactgcccacttggcagtacatcaagtgtatcatatgccaagtacgccccctattgacgtcaatgacggtaaatggcccgcctggcattatgcccagtacatgaccttatgggactttcctacttggcagtacatctacgtattagtcatcgctattaccatggtgatgcggttttggcagtacatcaatgggcgtggatagcggtttgactcacggggatttccaagtctccaccccattgacgtcaatgggagtttgttttggcaccaaaatcaacgggactttccaaaatgtcgtaacaactccgccccattgacgcaaatgggcggtaggcgtgtacggtgggaggtctatataagcagcgcgttttgcctgtactgggtctctctggttagaccagatctgagcctgggagctctctggctaactagggaacccactgcttaagcctcaataaagcttgccttgagtgcttcaagtagtgtgtgcccgtctgttgtgtgactctggtaactagagatccctcagacccttttagtcagtgtggaaaatctctagcagtggcgcccgaacagggacttgaaagcgaaagggaaaccagaggagctctctcgacgcaggactcggcttgctgaagcgcgcacggcaagaggcgaggggcggcgactggtgagtacgccaaaaattttgactagcggaggctagaaggagagagatgggtgcgagagcgtcagtattaagcgggggagaattagatcgcgatgggaaaaaattcggttaaggccagggggaaagaaaaaatataaattaaaacatatagtatgggcaagcagggagctagaacgattcgcagttaatcctggcctgttagaaacatcagaaggctgtagacaaatactgggacagctacaaccatcccttcagacaggatcagaagaacttagatcattatataatacagtagcaaccctctattgtgtgcatcaaaggatagagataaaagacaccaaggaagctttagacaagatagaggaagagcaaaacaaaagtaagaccaccgcacagcaagcggccgctgatcttcagacctggaggaggagatatgagggacaattggagaagtgaattatataaatataaagtagtaaaaattgaaccattaggagtagcacccaccaaggcaaagagaagagtggtgcagagagaaaaaagagcagtgggaataggagctttgttccttgggttcttgggagcagcaggaagcactatgggcgcagcgtcaatgacgctgacggtacaggccagacaattattgtctggtatagtgcagcagcagaacaatttgctgagggctattgaggcgcaacagcatctgttgcaactcacagtctggggcatcaagcagctccaggcaagaatcctggctgtggaaagatacctaaaggatcaacagctcctggggatttggggttgctctggaaaactcatttgcaccactgctgtgccttggaatgctagttggagtaataaatctctggaacagatttggaatcacacgacctggatggagtgggacagagaaattaacaattacacaagcttaatacactccttaattgaagaatcgcaaaaccagcaagaaaagaatgaacaagaattattggaattagataaatgggcaagtttgtggaattggtttaacataacaaattggctgtggtatataaaattattcataatgatagtaggaggcttggtaggtttaagaatagtttttgctgtactttctatagtgaatagagttaggcagggatattcaccattatcgtttcagacccacctcccaaccccgaggggacccgacaggcccgaaggaatagaagaagaaggtggagagagagacagagacagatccattcgattagtgaacggatcggcactgcgtgcgccaattctgcagacaaatggcagtattcatccacaattttaaaagaaaaggggggattggggggtacagtgcaggggaaagaatagtagacataatagcaacagacatacaaactaaagaattacaaaaacaaattacaaaaattcaaaattttcgggtttattacagggacagcagagatccagtttggttaattaaggtaccaaggatccggatccgcccctctccctcccccccccctaacgttactggccgaagccgcttggaataaggccggtgtgcgtttgtctatatgttattttccaccatattgccgtcttttggcaatgtgagggcccggaaacctggccctgtcttcttgacgagcattcctaggggtctttcccctctcgccaaaggaatgcaaggtctgttgaatgtcgtgaaggaagcagttcctctggaagcttcttgaagacaaacaacgtctgtagcgaccctttgcaggcagcggaaccccccacctggcgacaggtgcctctgcggccaaaagccacgtgtataagatacacctgcaaaggcggcacaaccccagtgccacgttgtgagttggatagttgtggaaagagtcaaatggctctcctcaagcgtattcaacaaggggctgaaggatgcccagaaggtaccccattgtatgggatctgatctggggcctcggtgcacatgctttacatgtgtttagtcgaggttaaaaaaacgtctaggccccccgaaccacggggacgtggttttcctttgaaaaacacgatgataatatggccacaaccatgaccatggtgagcaagggcgaggaggtcatcaaagagttcatgcgcttcaaggtgcgcatggagggctccatgaacggccacgagttcgagatcgagggcgagggcgagggccgcccctacgagggcacccagaccgccaagctgaaggtgaccaagggcggccccctgcccttcgcctgggacatcctgtccccccagttcatgtacggctccaaggcgtacgtgaagcaccccgccgacatccccgattacaagaagctgtccttccccgagggcttcaagtgggagcgcgtgatgaacttcgaggacggcggtctggtgaccgtgacccaggactcctccctgcaggacggcacgctgatctacaaggtgaagatgcgcggcaccaacttcccccccgacggccccgtaatgcagaagaagaccatgggctgggaggcctccaccgagcgcctgtacccccgcgacggcgtgctgaagggcgagatccaccaggccctgaagctgaaggacggcggccactacctggtggagttcaagaccatctacatggccaagaagcccgtgcaactgcccggctactactacgtggacaccaagctggacatcacctcccacaacgaggactacaccatcgtggaacagtacgagcgctccgagggccgccaccacctgttcctggggcatggcaccggcagcaccggcagcggcagctccggcaccgcctcctccgaggacaacaacatggccgtcatcaaagagttcatgcgcttcaaggtgcgcatggagggctccatgaacggccacgagttcgagatcgagggcgagggcgagggccgcccctacgagggcacccagaccgccaagctgaaggtgaccaagggcggccccctgcccttcgcctgggacatcctgtccccccagttcatgtacggctccaaggcgtacgtgaagcaccccgccgacatccccgattacaagaagctgtccttccccgagggcttcaagtgggagcgcgtgatgaacttcgaggacggcggtctggtgaccgtgacccaggactcctccctgcaggacggcacgctgatctacaaggtgaagatgcgcggcaccaacttcccccccgacggccccgtaatgcagaagaagaccatgggctgggaggcctccaccgagcgcctgtacccccgcgacggcgtgctgaagggcgagatccaccaggccctgaagctgaaggacggcggccgctacctggtggagttcaagaccatctacatggccaagaagcccgtgcaactgcccggctactactacgtggacaccaagctggacatcacctcccacaacgaggactacaccatcgtggaacagtacgagcgctccgagggccgccaccacctgttcctgtacggcatggacgagctgtacaagtagtctagatctagaccgcggcctgctgccggctctgcggcctcttccgcgtcttcgccttcgccctcagacgagtcggatctccctttgggccgcctccccgcgtcgactttaagaccaatgacttacaaggcagctgtagatcttagccactttttaaaagaaaaggggggactggaagggctaattcactcccaacgaagacaagatctgctttttgcttgtactgggtctctctggttagaccagatctgagcctgggagctctctggctaactagggaacccactgcttaagcctcaataaagcttgccttgagtgcttcaagtagtgtgtgcccgtctgttgtgtgactctggtaactagagatccctcagacccttttagtcagtgtggaaaatctctagcagggcccgtttaaacccgctgatcagcctcgactgtgccttctagttgccagccatctgttgtttgcccctcccccgtgccttccttgaccctggaaggtgccactcccactgtcctttcctaataaaatgaggaaattgcatcgcattgtctgagtaggtgtcattctattctggggggtggggtggggcaggacagcaagggggaggattgggaagacaatagcaggcatgctggggatgcggtgggctctatg

SEQ ID NO: 265 - DNA, 6954 bp, Artificial Sequence
  chemically synthesized
atgaatttgccaggaagatggaaaccaaaaatgatagggggaattggaggttttatcaaagtaagacagtatgatcagatactcatagaaatctgcggacataaagctataggtacagtattagtaggacctacacctgtcaacataattggaagaaatctgttgactcagattggctgcactttaaattttcccattagtcctattgagactgtaccagtaaaattaaagccaggaatggatggcccaaaagttaaacaatggccattgacagaagaaaaaataaaagcattagtagaaatttgtacagaaatggaaaaggaaggaaaaatttcaaaaattgggcctgaaaatccatacaatactccagtatttgccataaagaaaaaagacagtactaaatggagaaaattagtagatttcagagaacttaataagagaactcaagatttctgggaagttcaattaggaataccacatcctgcagggttaaaacagaaaaaatcagtaacagtactggatgtgggcgatgcatatttttcagttcccttagataaagacttcaggaagtatactgcatttaccatacctagtataaacaatgagacaccagggattagatatcagtacaatgtgcttccacagggatggaaaggatcaccagcaatattccagtgtagcatgacaaaaatcttagagccttttagaaaacaaaatccagacatagtcatctatcaatacatggatgatttgtatgtaggatctgacttagaaatagggcagcatagaacaaaaatagaggaactgagacaacatctgttgaggtggggatttaccacaccagacaaaaaacatcagaaagaacctccattcctttggatgggttatgaactccatcctgataaatggacagtacagcctatagtgctgccagaaaaggacagctggactgtcaatgacatacagaaattagtgggaaaattgaattgggcaagtcagatttatgcagggattaaagtaaggcaattatgtaaacttcttaggggaaccaaagcactaacagaagtagtaccactaacagaagaagcagagctagaactggcagaaaacagggagattctaaaagaaccggtacatggagtgtattatgacccatcaaaagacttaatagcagaaatacagaagcaggggcaaggccaatggacatatcaaatttatcaagagccatttaaaaatctgaaaacaggaaagtatgcaagaatgaagggtgcccacactaatgatgtgaaacaattaacagaggcagtacaaaaaatagccacagaaagcatagtaatatggggaaagactcctaaatttaaattacccatacaaaaggaaacatgggaagcatggtggacagagtattggcaagccacctggattcctgagtgggagtttgtcaatacccctcccttagtgaagttatggtaccagttagagaaagaacccataataggagcagaaactttctatgtagatggggcagccaatagggaaactaaattaggaaaagcaggatatgtaactgacagaggaagacaaaaagttgtccccctaacggacacaacaaatcagaagactgagttacaagcaattcatctagctttgcaggattcgggattagaagtaaacatagtgacagactcacaatatgcattgggaatcattcaagcacaaccagataagagtgaatcagagttagtcagtcaaataatagagcagttaataaaaaaggaaaaagtctacctggcatgggtaccagcacacaaaggaattggaggaaatgaacaagtagataaattggtcagtgctggaatcaggaaagtactatttttagatggaatagataaggcccaagaacccggtgccaccatgcccaaaaagaagaggaaagtcagctcttttttggacggtattgacaaagctcaggacgaacatgaaaagtaccactctaactggagagctatggcctccgattttaatcttccgccggtggtagcgaaagaaatcgttgccagttgcgacaaatgccaattgaagggagaagccatgcatggtcaagtggattgttcccccggaatatggcaactcgattgcacgcatctggaaggcaaggtcatcctcgtagcggtacatgttgcttctggatatattgaggccgaggttataccggcagaaacgggccaagaaacagcgtactttctcctgaagcttgcgggacgctggcctgtgaaaacgattcataccgacaacggttctaactttaccggagcaacagtacgggccgcatgctggtgggccggtataaagcaggaatttgggattccatacaatccgcaaagtcaaggtgtcgtcgagtctatgaataaggaactcaaaaagataattggtcaggttagagatcaagccgaacatctcaagacggcggtccaaatggcagtttttattcacaactttaagaggaaaggtgggattggtggctattcagcaggggagcgaatagtggacataatagcaaccgacatacagactaaggagttgcaaaagcagatcacaaagattcaaaatgggggcgggggaagcggcggtggaggtagtggagggggaggatcagataaaaagtattctattggtttagccatcggcactaattccgttggatgggctgtcataaccgatgaatacaaagtaccttcaaagaaatttaaggtgttggggaacacagaccgtcattcgattaaaaagaatcttatcggtgccctcctattcgatagtggcgaaacggcagaggcgactcgcctgaaacgaaccgctcggagaaggtatacacgtcgcaagaaccgaatatgttacttacaagaaatttttagcaatgagatggccaaagttgacgattctttctttcaccgtttggaagagtccttccttgtcgaagaggacaagaaacatgaacggcaccccatctttggaaacatagtagatgaggtggcatatcatgaaaagtacccaacgatttatcacctcagaaaaaagctagttgactcaactgataaagcggacctgaggttaatctacttggctcttgcccatatgataaagttccgtgggcactttctcattgagggtgatctaaatccggacaactcggatgtcgacaaactgttcatccagttagtacaaacctataatcagttgtttgaagagaaccctataaatgcaagtggcgtggatgcgaaggctattcttagcgcccgcctctctaaatcccgacggctagaaaacctgatcgcacaattacccggagagaagaaaaatgggttgttcggtaaccttatagcgctctcactaggcctgacaccaaattttaagtcgaacttcgacttagctgaagatgccaaattgcagcttagtaaggacacgtacgatgacgatctcgacaatctactggcacaaattggagatcagtatgcggacttatttttggctgccaaaaaccttagcgatgcaatcctcctatctgacatactgagagttaatactgagattaccaaggcgccgttatccgcttcaatgatcaaaaggtacgatgaacatcaccaagacttgacacttctcaaggccctagtccgtcagcaactgcctgagaaatataaggaaatattctttgatcagtcgaaaaacgggtacgcaggttatattgacggcggagcgagtcaagaggaattctacaagtttatcaaacccatattagagaagatggatgggacggaagagttgcttgtaaaactcaatcgcgaagatctactgcgaaagcagcggactttcgacaacggtagcattccacatcaaatccacttaggcgaattgcatgctatacttagaaggcaggaggatttttatccgttcctcaaagacaatcgtgaaaagattgagaaaatcctaacctttcgcataccttactatgtgggacccctggcccgagggaactctcggttcgcatggatgacaagaaagtccgaagaaacgattactccatggaattttgaggaagttgtcgataaaggtgcgtcagctcaatcgttcatcgagaggatgaccaactttgacaagaatttaccgaacgaaaaagtattgcctaagcacagtttactttacgagtatttcacagtgtacaatgaactcacgaaagttaagtatgtcactgagggcatgcgtaaacccgcctttctaagcggagaacagaagaaagcaatagtagatctgttattcaagaccaaccgcaaagtgacagttaagcaattgaaagaggactactttaagaaaattgaatgcttcgattctgtcgagatctccggggtagaagatcgatttaatgcgtcacttggtacgtatcatgacctcctaaagataattaaagataaggacttcctggataacgaagagaatgaagatatcttagaagatatagtgttgactcttaccctctttgaagatcgggaaatgattgaggaaagactaaaaacatacgctcacctgttcgacgataaggttatgaaacagttaaagaggcgtcgctatacgggctggggacgattgtcgcggaaacttatcaacgggataagagacaagcaaagtggtaaaactattctcgattttctaaagagcgacggcttcgccaataggaactttatgcagctgatccatgatgactctttaaccttcaaagaggatatacaaaaggcacaggtttccggacaaggggactcattgcacgaacatattgcgaatcttgctggttcgccagccatcaaaaagggcatactccagacagtcaaagtagtggatgagctagttaaggtcatgggacgtcacaaaccggaaaacattgtaatcgagatggcacgcgaaaatcaaacgactcagaaggggcaaaaaaacagtcgagagcggatgaagagaatagaagagggtattaaagaactgggcagccagatcttaaaggagcatcctgtggaaaatacccaattgcagaacgagaaactttacctctattacctacaaaatggaagggacatgtatgttgatcaggaactggacataaaccgtttatctgattacgacgtcgatgccattgtaccccaatcctttttgaaggacgattcaatcgacaataaagtgcttacacgctcggataagaaccgagggaaaagtgacaatgttccaagcgaggaagtcgtaaagaaaatgaagaactattggcggcagctcctaaatgcgaaactgataacgcaaagaaagttcgataacttaactaaagctgagaggggtggcttgtctgaacttgacaaggccggatttattaaacgtcagctcgtggaaacccgccaaatcacaaagcatgttgcacagatactagattcccgaatgaatacgaaatacgacgagaacgataagctgattcgggaagtcaaagtaatcactttaaagtcaaaattggtgtcggacttcagaaaggattttcaattctataaagttagggagataaataactaccaccatgcgcacgacgcttatcttaatgccgtcgtagggaccgcactcattaagaaatacccgaagctagaaagtgagtttgtgtatggtgattacaaagtttatgacgtccgtaagatgatcgcgaaaagcgaacaggagataggcaaggctacagccaaatacttcttttattctaacattatgaatttctttaagacggaaatcactctggcaaacggagagatacgcaaacgacctttaattgaaaccaatggggagacaggtgaaatcgtatgggataagggccgggacttcgcgacggtgagaaaagttttgtccatgccccaagtcaacatagtaaagaaaactgaggtgcagaccggagggttttcaaaggaatcgattcttccaaaaaggaatagtgataagctcatcgctcgtaaaaaggactgggacccgaaaaagtacggtggcttcgatagccctacagttgcctattctgtcctagtagtggcaaaagttgagaagggaaaatccaagaaactgaagtcagtcaaagaattattggggataacgattatggagcgctcgtcttttgaaaagaaccccatcgacttccttgaggcgaaaggttacaaggaagtaaaaaaggatctcataattaaactaccaaagtatagtctgtttgagttagaaaatggccgaaaacggatgttggctagcgccggagagcttcaaaaggggaacgaactcgcactaccgtctaaatacgtgaatttcctgtatttagcgtcccattacgagaagttgaaaggttcacctgaagataacgaacagaagcaactttttgttgagcagcacaaacattatctcgacgaaatcatagagcaaatttcggaattcagtaagagagtcatcctagctgatgccaatctggacaaagtattaagcgcatacaacaagcacagggataaacccatacgtgagcaggcggaaaatattatccatttgtttactcttaccaacctcggcgctccagccgcattcaagtattttgacacaacgatagatcgcaaacgatacacttctaccaaggaggtgctagacgcgacactgattcaccaatccatcacgggattatatgaaactcggatagatttgtcacagcttgggggtgacggatccaactcaaagaaaaggtcactggaggacaacgaaacggaaatcaaagtctccagagacacctggaacactaagaacatgcggtccctggaaccgccacgaagcaagaaacggatacatctcgaggactacaaagaccatgacggtgattataaagatcatgacatcgattacaaggatgacgatgacaagtaa

SEQ ID NO: 266 - DNA, 6939 bp, Artificial Sequence
  chemically synthesized
atgaatttgccaggaagatggaaaccaaaaatgatagggggaattggaggttttatcaaagtaagacagtatgatcagatactcatagaaatctgcggacataaagctataggtacagtattagtaggacctacacctgtcaacataattggaagaaatctgttgactcagattggctgcactttaaattttcccattagtcctattgagactgtaccagtaaaattaaagccaggaatggatggcccaaaagttaaacaatggccattgacagaagaaaaaataaaagcattagtagaaatttgtacagaaatggaaaaggaaggaaaaatttcaaaaattgggcctgaaaatccatacaatactccagtatttgccataaagaaaaaagacagtactaaatggagaaaattagtagatttcagagaacttaataagagaactcaagatttctgggaagttcaattaggaataccacatcctgcagggttaaaacagaaaaaatcagtaacagtactggatgtgggcgatgcatatttttcagttcccttagataaagacttcaggaagtatactgcatttaccatacctagtataaacaatgagacaccagggattagatatcagtacaatgtgcttccacagggatggaaaggatcaccagcaatattccagtgtagcatgacaaaaatcttagagccttttagaaaacaaaatccagacatagtcatctatcaatacatggatgatttgtatgtaggatctgacttagaaatagggcagcatagaacaaaaatagaggaactgagacaacatctgttgaggtggggatttaccacaccagacaaaaaacatcagaaagaacctccattcctttggatgggttatgaactccatcctgataaatggacagtacagcctatagtgctgccagaaaaggacagctggactgtcaatgacatacagaaattagtgggaaaattgaattgggcaagtcagatttatgcagggattaaagtaaggcaattatgtaaacttcttaggggaaccaaagcactaacagaagtagtaccactaacagaagaagcagagctagaactggcagaaaacagggagattctaaaagaaccggtacatggagtgtattatgacccatcaaaagacttaatagcagaaatacagaagcaggggcaaggccaatggacatatcaaatttatcaagagccatttaaaaatctgaaaacaggaaagtatgcaagaatgaagggtgcccacactaatgatgtgaaacaattaacagaggcagtacaaaaaatagccacagaaagcatagtaatatggggaaagactcctaaatttaaattacccatacaaaaggaaacatgggaagcatggtggacagagtattggcaagccacctggattcctgagtgggagtttgtcaatacccctcccttagtgaagttatggtaccagttagagaaagaacccataataggagcagaaactttctatgtagatggggcagccaatagggaaactaaattaggaaaagcaggatatgtaactgacagaggaagacaaaaagttgtccccctaacggacacaacaaatcagaagactgagttacaagcaattcatctagctttgcaggattcgggattagaagtaaacatagtgacagactcacaatatgcattgggaatcattcaagcacaaccagataagagtgaatcagagttagtcagtcaaataatagagcagttaataaaaaaggaaaaagtctacctggcatgggtaccagcacacaaaggaattggaggaaatgaacaagtagataaattggtcagtgctggaatcaggaaagtactatttttagatggaatagataaggcccaagaacccggtgccaccatggactacaaagaccatgacggtgattataaagatcatgacatcgattacaaggatgacgatgacaagggcggaaactcaaagaaaaggtcactggaggacaacgaaacggaaatcaaagtctccagagacacctggaacactaagaacatgcggtccctggaaccgccacgaagcaagaaacggatacatggaggcgataaaaagtattctattggtttagccatcggcactaattccgttggatgggctgtcataaccgatgaatacaaagtaccttcaaagaaatttaaggtgttggggaacacagaccgtcattcgattaaaaagaatcttatcggtgccctcctattcgatagtggcgaaacggcagaggcgactcgcctgaaacgaaccgctcggagaaggtatacacgtcgcaagaaccgaatatgttacttacaagaaatttttagcaatgagatggccaaagttgacgattctttctttcaccgtttggaagagtccttccttgtcgaagaggacaagaaacatgaacggcaccccatctttggaaacatagtagatgaggtggcatatcatgaaaagtacccaacgatttatcacctcagaaaaaagctagttgactcaactgataaagcggacctgaggttaatctacttggctcttgcccatatgataaagttccgtgggcactttctcattgagggtgatctaaatccggacaactcggatgtcgacaaactgttcatccagttagtacaaacctataatcagttgtttgaagagaaccctataaatgcaagtggcgtggatgcgaaggctattcttagcgcccgcctctctaaatcccgacggctagaaaacctgatcgcacaattacccggagagaagaaaaatgggttgttcggtaaccttatagcgctctcactaggcctgacaccaaattttaagtcgaacttcgacttagctgaagatgccaaattgcagcttagtaaggacacgtacgatgacgatctcgacaatctactggcacaaattggagatcagtatgcggacttatttttggctgccaaaaaccttagcgatgcaatcctcctatctgacatactgagagttaatactgagattaccaaggcgccgttatccgcttcaatgatcaaaaggtacgatgaacatcaccaagacttgacacttctcaaggccctagtccgtcagcaactgcctgagaaatataaggaaatattctttgatcagtcgaaaaacgggtacgcaggttatattgacggcggagcgagtcaagaggaattctacaagtttatcaaacccatattagagaagatggatgggacggaagagttgcttgtaaaactcaatcgcgaagatctactgcgaaagcagcggactttcgacaacggtagcattccacatcaaatccacttaggcgaattgcatgctatacttagaaggcaggaggatttttatccgttcctcaaagacaatcgtgaaaagattgagaaaatcctaacctttcgcataccttactatgtgggacccctggcccgagggaactctcggttcgcatggatgacaagaaagtccgaagaaacgattactccatggaattttgaggaagttgtcgataaaggtgcgtcagctcaatcgttcatcgagaggatgaccaactttgacaagaatttaccgaacgaaaaagtattgcctaagcacagtttactttacgagtatttcacagtgtacaatgaactcacgaaagttaagtatgtcactgagggcatgcgtaaacccgcctttctaagcggagaacagaagaaagcaatagtagatctgttattcaagaccaaccgcaaagtgacagttaagcaattgaaagaggactactttaagaaaattgaatgcttcgattctgtcgagatctccggggtagaagatcgatttaatgcgtcacttggtacgtatcatgacctcctaaagataattaaagataaggacttcctggataacgaagagaatgaagatatcttagaagatatagtgttgactcttaccctctttgaagatcgggaaatgattgaggaaagactaaaaacatacgctcacctgttcgacgataaggttatgaaacagttaaagaggcgtcgctatacgggctggggacgattgtcgcggaaacttatcaacgggataagagacaagcaaagtggtaaaactattctcgattttctaaagagcgacggcttcgccaataggaactttatgcagctgatccatgatgactctttaaccttcaaagaggatatacaaaaggcacaggtttccggacaaggggactcattgcacgaacatattgcgaatcttgctggttcgccagccatcaaaaagggcatactccagacagtcaaagtagtggatgagctagttaaggtcatgggacgtcacaaaccggaaaacattgtaatcgagatggcacgcgaaaatcaaacgactcagaaggggcaaaaaaacagtcgagagcggatgaagagaatagaagagggtattaaagaactgggcagccagatcttaaaggagcatcctgtggaaaatacccaattgcagaacgagaaactttacctctattacctacaaaatggaagggacatgtatgttgatcaggaactggacataaaccgtttatctgattacgacgtcgatgccattgtaccccaatcctttttgaaggacgattcaatcgacaataaagtgcttacacgctcggataagaaccgagggaaaagtgacaatgttccaagcgaggaagtcgtaaagaaaatgaagaactattggcggcagctcctaaatgcgaaactgataacgcaaagaaagttcgataacttaactaaagctgagaggggtggcttgtctgaacttgacaaggccggatttattaaacgtcagctcgtggaaacccgccaaatcacaaagcatgttgcacagatactagattcccgaatgaatacgaaatacgacgagaacgataagctgattcgggaagtcaaagtaatcactttaaagtcaaaattggtgtcggacttcagaaaggattttcaattctataaagttagggagataaataactaccaccatgcgcacgacgcttatcttaatgccgtcgtagggaccgcactcattaagaaatacccgaagctagaaagtgagtttgtgtatggtgattacaaagtttatgacgtccgtaagatgatcgcgaaaagcgaacaggagataggcaaggctacagccaaatacttcttttattctaacattatgaatttctttaagacggaaatcactctggcaaacggagagatacgcaaacgacctttaattgaaaccaatggggagacaggtgaaatcgtatgggataagggccgggacttcgcgacggtgagaaaagttttgtccatgccccaagtcaacatagtaaagaaaactgaggtgcagaccggagggttttcaaaggaatcgattcttccaaaaaggaatagtgataagctcatcgctcgtaaaaaggactgggacccgaaaaagtacggtggcttcgatagccctacagttgcctattctgtcctagtagtggcaaaagttgagaagggaaaatccaagaaactgaagtcagtcaaagaattattggggataacgattatggagcgctcgtcttttgaaaagaaccccatcgacttccttgaggcgaaaggttacaaggaagtaaaaaaggatctcataattaaactaccaaagtatagtctgtttgagttagaaaatggccgaaaacggatgttggctagcgccggagagcttcaaaaggggaacgaactcgcactaccgtctaaatacgtgaatttcctgtatttagcgtcccattacgagaagttgaaaggttcacctgaagataacgaacagaagcaactttttgttgagcagcacaaacattatctcgacgaaatcatagagcaaatttcggaattcagtaagagagtcatcctagctgatgccaatctggacaaagtattaagcgcatacaacaagcacagggataaacccatacgtgagcaggcggaaaatattatccatttgtttactcttaccaacctcggcgctccagccgcattcaagtattttgacacaacgatagatcgcaaacgatacacttctaccaaggaggtgctagacgcgacactgattcaccaatccatcacgggattatatgaaactcggatagatttgtcacagcttgggggtgacggatccggaggtggaggaagcggcggtggaggtagtggaggtggaggatcactcgagtttttggacggtattgacaaagctcaggacgaacatgaaaagtaccactctaactggagagctatggcctccgattttaatcttccgccggtggtagcgaaagaaatcgttgccagttgcgacaaatgccaattgaagggagaagccatgcatggtcaagtggattgttcccccggaatatggcaactcgattgcacgcatctggaaggcaaggtcatcctcgtagcggtacatgttgcttctggatatattgaggccgaggttataccggcagaaacgggccaagaaacagcgtactttctcctgaagcttgcgggacgctggcctgtgaaaacgattcataccgacaacggttctaactttaccggagcaacagtacgggccgcatgctggtgggccggtataaagcaggaatttgggattccatacaatccgcaaagtcaaggtgtcgtcgagtctatgaataaggaactcaaaaagataattggtcaggttagagatcaagccgaacatctcaagacggcggtccaaatggcagtttttattcacaactttaagaggaaaggtgggattggtggctattcagcaggggagcgaatagtggacataatagcaaccgacatacagactaaggagttgcaaaagcagatcacaaagattcaaaattaa

SEQ ID NO: 267 - DNA, 5634 bp, Artificial Sequence
  chemically synthesized
atgaatttgccaggaagatggaaaccaaaaatgatagggggaattggaggttttatcaaagtaagacagtatgatcagatactcatagaaatctgcggacataaagctataggtacagtattagtaggacctacacctgtcaacataattggaagaaatctgttgactcagattggctgcactttaaattttcccattagtcctattgagactgtaccagtaaaattaaagccaggaatggatggcccaaaagttaaacaatggccattgacagaagaaaaaataaaagcattagtagaaatttgtacagaaatggaaaaggaaggaaaaatttcaaaaattgggcctgaaaatccatacaatactccagtatttgccataaagaaaaaagacagtactaaatggagaaaattagtagatttcagagaacttaataagagaactcaagatttctgggaagttcaattaggaataccacatcctgcagggttaaaacagaaaaaatcagtaacagtactggatgtgggcgatgcatatttttcagttcccttagataaagacttcaggaagtatactgcatttaccatacctagtataaacaatgagacaccagggattagatatcagtacaatgtgcttccacagggatggaaaggatcaccagcaatattccagtgtagcatgacaaaaatcttagagccttttagaaaacaaaatccagacatagtcatctatcaatacatggatgatttgtatgtaggatctgacttagaaatagggcagcatagaacaaaaatagaggaactgagacaacatctgttgaggtggggatttaccacaccagacaaaaaacatcagaaagaacctccattcctttggatgggttatgaactccatcctgataaatggacagtacagcctatagtgctgccagaaaaggacagctggactgtcaatgacatacagaaattagtgggaaaattgaattgggcaagtcagatttatgcagggattaaagtaaggcaattatgtaaacttcttaggggaaccaaagcactaacagaagtagtaccactaacagaagaagcagagctagaactggcagaaaacagggagattctaaaagaaccggtacatggagtgtattatgacccatcaaaagacttaatagcagaaatacagaagcaggggcaaggccaatggacatatcaaatttatcaagagccatttaaaaatctgaaaacaggaaagtatgcaagaatgaagggtgcccacactaatgatgtgaaacaattaacagaggcagtacaaaaaatagccacagaaagcatagtaatatggggaaagactcctaaatttaaattacccatacaaaaggaaacatgggaagcatggtggacagagtattggcaagccacctggattcctgagtgggagtttgtcaatacccctcccttagtgaagttatggtaccagttagagaaagaacccataataggagcagaaactttctatgtagatggggcagccaatagggaaactaaattaggaaaagcaggatatgtaactgacagaggaagacaaaaagttgtccccctaacggacacaacaaatcagaagactgagttacaagcaattcatctagctttgcaggattcgggattagaagtaaacatagtgacagactcacaatatgcattgggaatcattcaagcacaaccagataagagtgaatcagagttagtcagtcaaataatagagcagttaataaaaaaggaaaaagtctacctggcatgggtaccagcacacaaaggaattggaggaaatgaacaagtagataaattggtcagtgctggaatcaggaaagtactatttttagatggaatagataaggcccaagaacccggtgccaccatggactacaaagaccatgacggtgattataaagatcatgacatcgactacaaggatgacgatgacaagggcggaaactcaaagaaaaggtcactggaggacaacgaaacggaaatcaaagtctccagagacacctggaacactaagaacatgcggtccctggaaccgccacgaagcaagaaacggatacatggaggccccgggggaatcgattacaaggatgacgatgacaagatggcccccaagaagaagaggaaggtgggcattcaccgcggggtacctatggtggacttgaggacactcggttattcgcaacagcaacaggagaaaatcaagcctaaggtcaggagcaccgtcgcgcaacaccacgaggcgcttgtggggcatggcttcactcatgcgcatattgtcgcgctttcacagcaccctgcggcgcttgggacggtggctgtcaaataccaagatatgattgcggccctgcccgaagccacgcacgaggcaattgtaggggtcggtaaacagtggtcgggagcgcgagcacttgaggcgctgctgactgtggcgggtgagcttagggggcctccgctccagctcgacaccgggcagctgctgaagatcgcgaagagagggggagtaacagcggtagaggcagtgcacgcctggcgcaatgcgctcaccggggcccccttgaacctgaccccagaccaggtagtcgcaatcgcgaacaataatgggggaaagcaagccctggaaaccgtgcaaaggttgttgccggtcctttgtcaagaccacggccttacaccggagcaagtcgtggccattgcaagcaacatcggtggcaaacaggctcttgagacggttcagagacttctcccagttctctgtcaagcccacgggctgactcccgatcaagttgtagcgattgcgtcgaacattggagggaaacaagcattggagactgtccaacggctccttcccgtgttgtgtcaagcccacggtttgacgcctgcacaagtggtcgccatcgccaacaacaacggcggtaagcaggcgctggaaacagtacagcgcctgctgcctgtactgtgccaggatcatggactgaccccagaccaggtagtcgcaatcgcgtcaaacggagggggaaagcaagccctggaaaccgtgcaaaggttgttgccggtcctttgtcaagaccacggccttacaccggagcaagtcgtggccattgcaagcaatgggggtggcaaacaggctcttgagacggttcagagacttctcccagttctctgtcaagcccacgggctgactcccgatcaagttgtagcgattgcgtcgcatgacggagggaaacaagcattggagactgtccaacggctccttcccgtgttgtgtcaagcccacggtttgacgcctgcacaagtggtcgccatcgcctccaatattggcggtaagcaggcgctggaaacagtacagcgcctgctgcctgtactgtgccaggatcatggactgaccccagaccaggtagtcgcaatcgcgtcaaacggagggggaaagcaagccctggaaaccgtgcaaaggttgttgccggtcctttgtcaagaccacggccttacaccggagcaagtcgtggccattgcatcccacgacggtggcaaacaggctcttgagacggttcagagacttctcccagttctctgtcaagcccacgggctgactcccgatcaagttgtagcgattgcgtccaacggtggagggaaacaagcattggagactgtccaacggctccttcccgtgttgtgtcaagcccacggtttgacgcctgcacaagtggtcgccatcgccaacaacaacggcggtaagcaggcgctggaaacagtacagcgcctgctgcctgtactgtgccaggatcatggactgaccccagaccaggtagtcgcaatcgcgtcacatgacgggggaaagcaagccctggaaaccgtgcaaaggttgttgccggtcctttgtcaagaccacggccttacaccggagcaagtcgtggccattgcaagcaacatcggtggcaaacaggctcttgagacggttcagagacttctcccagttctctgtcaagcccacgggctgactcccgatcaagttgtagcgattgcgtcgcatgacggagggaaacaagcattggagactgtccaacggctccttcccgtgttgtgtcaagcccacggtttgacgcctgcacaagtggtcgccatcgccagccatgatggcggtaagcaggcgctggaaacagtacagcgcctgctgcctgtactgtgccaggatcatggactgaccccagaccaggtagtcgcaatcgcgtcgaacattgggggaaagcaagccctggaaaccgtgcaaaggttgttgccggtcctttgtcaagaccacggcctgacacccgaacaggtggtcgccattgcttcccacgacggaggacggccagccttggagtccatcgtagcccaattgtccaggcccgatcccgcgttggctgcgttaacgaatgaccatctggtggcgttggcatgtcttggtggacgacccgcgctcgatgcagtcaaaaagggtctgcctcatgctcccgcattgatcaaaagaaccaaccggcggattcccgagagaacttcccatcgagtcgcgggatccacgcgtttcttggacggtattgacaaagctcaggacgaacatgaaaagtaccactctaactggagagctatggcctccgattttaatcttccgccggtggtagcgaaagaaatcgttgccagttgcgacaaatgccaattgaagggagaagccatgcatggtcaagtggattgttcccccggaatatggcaactcgattgcacgcatctggaaggcaaggtcatcctcgtagcggtacatgttgcttctggatatattggcgccgaggttataccggcagaaacgggccaagaaacagcgtactttctcctgaaacttgcgggacgctggcctgtgaaaacgattcataccgacaacggttctaactttaccggagcaacagtacgggccgcatgctggtgggccggtataaagcaggaatttgggattccatacaatccgcaaagtcaaggtgtcgtcgagtctatgaataaggaactcaaaaagataattggtcaggttagagatcaagccgaacatctcaagacggcggtccaaatggcagtttttattcacaactttaagaggaaaggtgggattggtggctattcagcaggggagcgaatagtggacataatagcaaccgacatacagactaaggagttgcaaaagcagatcacaaagattcaaaatctcgagtaatgacttaagacagcagtacaaatggcagtattcatccacaattttaaaagaaaaggggggattggggggtacagtgcaggggaaagaatagtagacataatagcaacagacatacaaactaaagaattacaaaaacaaattacaaaaattcaaaattttcgggtttattacagggacagcagagatccagtttggaaaggaccagcaaagctcctctggaaaggtgaaggggcagtagtaatacaagataatagtgacataaaagtagtgccaagaagaaaagcaaagatcatcagggattatggaaaacagatggcaggtgatgattgtgtggcaagtagacaggatgaggattaa

SEQ ID NO: 268 - DNA, 5415 bp, Artificial Sequence
  chemically synthesized
atgaatttgccaggaagatggaaaccaaaaatgatagggggaattggaggttttatcaaagtaagacagtatgatcagatactcatagaaatctgcggacataaagctataggtacagtattagtaggacctacacctgtcaacataattggaagaaatctgttgactcagattggctgcactttaaattttcccattagtcctattgagactgtaccagtaaaattaaagccaggaatggatggcccaaaagttaaacaatggccattgacagaagaaaaaataaaagcattagtagaaatttgtacagaaatggaaaaggaaggaaaaatttcaaaaattgggcctgaaaatccatacaatactccagtatttgccataaagaaaaaagacagtactaaatggagaaaattagtagatttcagagaacttaataagagaactcaagatttctgggaagttcaattaggaataccacatcctgcagggttaaaacagaaaaaatcagtaacagtactggatgtgggcgatgcatatttttcagttcccttagataaagacttcaggaagtatactgcatttaccatacctagtataaacaatgagacaccagggattagatatcagtacaatgtgcttccacagggatggaaaggatcaccagcaatattccagtgtagcatgacaaaaatcttagagccttttagaaaacaaaatccagacatagtcatctatcaatacatggatgatttgtatgtaggatctgacttagaaatagggcagcatagaacaaaaatagaggaactgagacaacatctgttgaggtggggatttaccacaccagacaaaaaacatcagaaagaacctccattcctttggatgggttatgaactccatcctgataaatggacagtacagcctatagtgctgccagaaaaggacagctggactgtcaatgacatacagaaattagtgggaaaattgaattgggcaagtcagatttatgcagggattaaagtaaggcaattatgtaaacttcttaggggaaccaaagcactaacagaagtagtaccactaacagaagaagcagagctagaactggcagaaaacagggagattctaaaagaaccggtacatggagtgtattatgacccatcaaaagacttaatagcagaaatacagaagcaggggcaaggccaatggacatatcaaatttatcaagagccatttaaaaatctgaaaacaggaaagtatgcaagaatgaagggtgcccacactaatgatgtgaaacaattaacagaggcagtacaaaaaatagccacagaaagcatagtaatatggggaaagactcctaaatttaaattacccatacaaaaggaaacatgggaagcatggtggacagagtattggcaagccacctggattcctgagtgggagtttgtcaatacccctcccttagtgaagttatggtaccagttagagaaagaacccataataggagcagaaactttctatgtagatggggcagccaatagggaaactaaattaggaaaagcaggatatgtaactgacagaggaagacaaaaagttgtccccctaacggacacaacaaatcagaagactgagttacaagcaattcatctagctttgcaggattcgggattagaagtaaacatagtgacagactcacaatatgcattgggaatcattcaagcacaaccagataagagtgaatcagagttagtcagtcaaataatagagcagttaataaaaaaggaaaaagtctacctggcatgggtaccagcacacaaaggaattggaggaaatgaacaagtagataaattggtcagtgctggaatcaggaaagtactatttttagatggaatagataaggcccaagaacccggtgccaccatgacgcgtttcttggacggtattgacaaagctcaggacgaacatgaaaagtaccactctaactggagagctatggcctccgattttaatcttccgccggtggtagcgaaagaaatcgttgccagttgcgacaaatgccaattgaagggagaagccatgcatggtcaagtggattgttcccccggaatatggcaactcgattgcacgcatctggaaggcaaggtcatcctcgtagcggtacatgttgcttctggatatattggcgccgaggttataccggcagaaacgggccaagaaacagcgtactttctcctgaaacttgcgggacgctggcctgtgaaaacgattcataccgacaacggttctaactttaccggagcaacagtacgggccgcatgctggtgggccggtataaagcaggaatttgggattccatacaatccgcaaagtcaaggtgtcgtcgagtctatgaataaggaactcaaaaagataattggtcaggttagagatcaagccgaacatctcaagacggcggtccaaatggcagtttttattcacaactttaagaggaaaggtgggattggtggctattcagcaggggagcgaatagtggacataatagcaaccgacatacagactaaggagttgcaaaagcagatcacaaagattcaaaatctcgaggggggcgggggaagcggcggtggaggtagtggagggggaggatcacccgggatcgattacaaggatgacgatgacaagatggcccccaagaagaagaggaaggtgggcattcaccgcggggtacctatggtggacttgaggacactcggttattcgcaacagcaacaggagaaaatcaagcctaaggtcaggagcaccgtcgcgcaacaccacgaggcgcttgtggggcatggcttcactcatgcgcatattgtcgcgctttcacagcaccctgcggcgcttgggacggtggctgtcaaataccaagatatgattgcggccctgcccgaagccacgcacgaggcaattgtaggggtcggtaaacagtggtcgggagcgcgagcacttgaggcgctgctgactgtggcgggtgagcttagggggcctccgctccagctcgacaccgggcagctgctgaagatcgcgaagagagggggagtaacagcggtagaggcagtgcacgcctggcgcaatgcgctcaccggggcccccttgaacctgaccccagaccaggtagtcgcaatcgcgtcaaacggagggggaaagcaagccctggaaaccgtgcaaaggttgttgccggtcctttgtcaagaccacggccttacaccggagcaagtcgtggccattgcatcccacgacggtggcaaacaggctcttgagacggttcagagacttctcccagttctctgtcaagcccacgggctgactcccgatcaagttgtagcgattgcgtcgaacattggagggaaacaagcattggagactgtccaacggctccttcccgtgttgtgtcaagcccacggtttgacgcctgcacaagtggtcgccatcgcctccaatattggcggtaagcaggcgctggaaacagtacagcgcctgctgcctgtactgtgccaggatcatggactgaccccagaccaggtagtcgcaatcgcgaacaataatgggggaaagcaagccctggaaaccgtgcaaaggttgttgccggtcctttgtcaagaccacggccttacaccggagcaagtcgtggccattgcaagcaatgggggtggcaaacaggctcttgagacggttcagagacttctcccagttctctgtcaagcccacgggctgactcccgatcaagttgtagcgattgcgtcgcatgacggagggaaacaagcattggagactgtccaacggctccttcccgtgttgtgtcaagcccacggtttgacgcctgcacaagtggtcgccatcgccagccatgatggcggtaagcaggcgctggaaacagtacagcgcctgctgcctgtactgtgccaggatcatggactgaccccagaccaggtagtcgcaatcgcgaacaataatgggggaaagcaagccctggaaaccgtgcaaaggttgttgccggtcctttgtcaagaccacggccttacaccggagcaagtcgtggccattgcatcccacgacggtggcaaacaggctcttgagacggttcagagacttctcccagttctctgtcaagcccacgggctgactcccgatcaagttgtagcgattgcgtcgcatgacggagggaaacaagcattggagactgtccaacggctccttcccgtgttgtgtcaagcccacggtttgacgcctgcacaagtggtcgccatcgcctccaatattggcggtaagcaggcgctggaaacagtacagcgcctgctgcctgtactgtgccaggatcatggactgaccccagaccaggtagtcgcaatcgcgtcaaacggagggggaaagcaagccctggaaaccgtgcaaaggttgttgccggtcctttgtcaagaccacggccttacaccggagcaagtcgtggccattgcaaataataacggtggcaaacaggctcttgagacggttcagagacttctcccagttctctgtcaagcccacgggctgactcccgatcaagttgtagcgattgcgtcgcatgacggagggaaacaagcattggagactgtccaacggctccttcccgtgttgtgtcaagcccacggtttgacgcctgcacaagtggtcgccatcgccagccatgatggcggtaagcaggcgctggaaacagtacagcgcctgctgcctgtactgtgccaggatcatggactgaccccagaccaggtagtcgcaatcgcgtcacatgacgggggaaagcaagccctggaaaccgtgcaaaggttgttgccggtcctttgtcaagaccacggccttacaccggagcaagtcgtggccattgcaaataataacggtggcaaacaggctcttgagacggttcagagacttctcccagttctctgtcaagcccacgggctgacacccgaacaggtggtcgccattgcttctaatgggggaggacggccagccttggagtccatcgtagcccaattgtccaggcccgatcccgcgttggctgcgttaacgaatgaccatctggtggcgttggcatgtcttggtggacgacccgcgctcgatgcagtcaaaaagggtctgcctcatgctcccgcattgatcaaaagaaccaaccggcggattcccgagagaacttcccatcgagtcgcgggatccaactcaaagaaaaggtcactggaggacaacgaaacggaaatcaaagtctccagagacacctggaacactaagaacatgcggtccctggaaccgccacgaagcaagaaacggatacatggcggagactacaaagaccatgacggtgattataaagatcatgacatcgactacaaggatgacgatgacaagtaa

SEQ ID NO: 269 - DNA, 5415 bp, Artificial Sequence; identical to SEQ ID NO: 268
  chemically synthesized

SEQ ID NO: 270 - DNA, 5313 bp, Artificial Sequence
  chemically synthesized
atgaatttgccaggaagatggaaaccaaaaatgatagggggaattggaggttttatcaaagtaagacagtatgatcagatactcatagaaatctgcggacataaagctataggtacagtattagtaggacctacacctgtcaacataattggaagaaatctgttgactcagattggctgcactttaaattttcccattagtcctattgagactgtaccagtaaaattaaagccaggaatggatggcccaaaagttaaacaatggccattgacagaagaaaaaataaaagcattagtagaaatttgtacagaaatggaaaaggaaggaaaaatttcaaaaattgggcctgaaaatccatacaatactccagtatttgccataaagaaaaaagacagtactaaatggagaaaattagtagatttcagagaacttaataagagaactcaagatttctgggaagttcaattaggaataccacatcctgcagggttaaaacagaaaaaatcagtaacagtactggatgtgggcgatgcatatttttcagttcccttagataaagacttcaggaagtatactgcatttaccatacctagtataaacaatgagacaccagggattagatatcagtacaatgtgcttccacagggatggaaaggatcaccagcaatattccagtgtagcatgacaaaaatcttagagccttttagaaaacaaaatccagacatagtcatctatcaatacatggatgatttgtatgtaggatctgacttagaaatagggcagcatagaacaaaaatagaggaactgagacaacatctgttgaggtggggatttaccacaccagacaaaaaacatcagaaagaacctccattcctttggatgggttatgaactccatcctgataaatggacagtacagcctatagtgctgccagaaaaggacagctggactgtcaatgacatacagaaattagtgggaaaattgaattgggcaagtcagatttatgcagggattaaagtaaggcaattatgtaaacttcttaggggaaccaaagcactaacagaagtagtaccactaacagaagaagcagagctagaactggcagaaaacagggagattctaaaagaaccggtacatggagtgtattatgacccatcaaaagacttaatagcagaaatacagaagcaggggcaaggccaatggacatatcaaatttatcaagagccatttaaaaatctgaaaacaggaaagtatgcaagaatgaagggtgcccacactaatgatgtgaaacaattaacagaggcagtacaaaaaatagccacagaaagcatagtaatatggggaaagactcctaaatttaaattacccatacaaaaggaaacatgggaagcatggtggacagagtattggcaagccacctggattcctgagtgggagtttgtcaatacccctcccttagtgaagttatggtaccagttagagaaagaacccataataggagcagaaactttctatgtagatggggcagccaatagggaaactaaattaggaaaagcaggatatgtaactgacagaggaagacaaaaagttgtccccctaacggacacaacaaatcagaagactgagttacaagcaattcatctagctttgcaggattcgggattagaagtaaacatagtgacagactcacaatatgcattgggaatcattcaagcacaaccagataagagtgaatcagagttagtcagtcaaataatagagcagttaataaaaaaggaaaaagtctacctggcatgggtaccagcacacaaaggaattggaggaaatgaacaagtagataaattggtcagtgctggaatcaggaaagtactatttttagatggaatagataaggcccaagaacccggtgccaccatgacgcgtttcttggacggtattgacaaagctcaggacgaacatgaaaagtaccactctaactggagagctatggcctccgattttaatcttccgccggtggtagcgaaagaaatcgttgccagttgcgacaaatgccaattgaagggagaagccatgcatggtcaagtggattgttcccccggaatatggcaactcgattgcacgcatctggaaggcaaggtcatcctcgtagcggtacatgttgcttctggatatattggcgccgaggttataccggcagaaacgggccaagaaacagcgtactttctcctgaaacttgcgggacgctggcctgtgaaaacgattcataccgacaacggttctaactttaccggagcaacagtacgggccgcatgctggtgggccggtataaagcaggaatttgggattccatacaatccgcaaagtcaaggtgtcgtcgagtctatgaataaggaactcaaaaagataattggtcaggttagagatcaagccgaacatctcaagacggcggtccaaatggcagtttttattcacaactttaagaggaaaggtgggattggtggctattcagcaggggagcgaatagtggacataatagcaaccgacatacagactaaggagttgcaaaagcagatcacaaagattcaaaatctcgaggggggcgggggaagcggcggtggaggtagtggagggggaggatcacccgggatcgattacaaggatgacgatgacaagatggcccccaagaagaagaggaaggtgggcattcaccgcggggtacctatggtggacttgaggacactcggttattcgcaacagcaacaggagaaaatcaagcctaaggtcaggagcaccgtcgcgcaacaccacgaggcgcttgtggggcatggcttcactcatgcgcatattgtcgcgctttcacagcaccctgcggcgcttgggacggtggctgtcaaataccaagatatgattgcggccctgcccgaagccacgcacgaggcaattgtaggggtcggtaaacagtggtcgggagcgcgagcacttgaggcgctgctgactgtggcgggtgagcttagggggcctccgctccagctcgacaccgggcagctgctgaagatcgcgaagagagggggagtaacagcggtagaggcagtgcacgcctggcgcaatgcgctcaccggggcccccttgaacctgaccccagaccaggtagtcgcaatcgcgaacaataatgggggaaagcaagccctggaaaccgtgcaaaggttgttgccggtcctttgtcaagaccacggccttacaccggagcaagtcgtggccattgcaagcaatgggggtggcaaacaggctcttgagacggttcagagacttctcccagttctctgtcaagcccacgggctgactcccgatcaagttgtagcgattgcgaataacaatggagggaaacaagcattggagactgtccaacggctccttcccgtgttgtgtcaagcccacggtttgacgcctgcacaagtggtcgccatcgccaacaacaacggcggtaagcaggcgctggaaacagtacagcgcctgctgcctgtactgtgccaggatcatggactgaccccagaccaggtagtcgcaatcgcgtcaaacggagggggaaagcaagccctggaaaccgtgcaaaggttgttgccggtcctttgtcaagaccacggccttacaccggagcaagtcgtggccattgcatcccacgacggtggcaaacaggctcttgagacggttcagagacttctcccagttctctgtcaagcccacgggctgactcccgatcaagttgtagcgattgcgaataacaatggagggaaacaagcattggagactgtccaacggctccttcccgtgttgtgtcaagcccacggtttgacgcctgcacaagtggtcgccatcgccaacaacaacggcggtaagcaggcgctggaaacagtacagcgcctgctgcctgtactgtgccaggatcatggactgaccccagaccaggtagtcgcaatcgcgaacaataatgggggaaagcaagccctggaaaccgtgcaaaggttgttgccggtcctttgtcaagaccacggccttacaccggagcaagtcgtggccattgcaaataataacggtggcaaacaggctcttgagacggttcagagacttctcccagttctctgtcaagcccacgggctgactcccgatcaagttgtagcgattgcgtccaacggtggagggaaacaagcattggagactgtccaacggctccttcccgtgttgtgtcaagcccacggtttgacgcctgcacaagtggtcgccatcgcctccaatattggcggtaagcaggcgctggaaacagtacagcgcctgctgcctgtactgtgccaggatcatggactgaccccagaccaggtagtcgcaatcgcgaacaataatgggggaaagcaagccctggaaaccgtgcaaaggttgttgccggtcctttgtcaagaccacggccttacaccggagcaagtcgtggccattgcatcccacgacggtggcaaacaggctcttgagacggttcagagacttctcccagttctctgtcaagcccacgggctgactcccgatcaagttgtagcgattgcgaataacaatggagggaaacaagcattggagactgtccaacggctccttcccgtgttgtgtcaagcccacggtttgacgcctgcacaagtggtcgccatcgccaacaacaacggcggtaagcaggcgctggaaacagtacagcgcctgctgcctgtactgtgccaggatcatggactgaccccagaccaggtagtcgcaatcgcgtcacatgacgggggaaagcaagccctggaaaccgtgcaaaggttgttgccggtcctttgtcaagaccacggcctgacacccgaacaggtggtcgccattgcttctaatgggggaggacggccagccttggagtccatcgtagcccaattgtccaggcccgatcccgcgttggctgcgttaacgaatgaccatctggtggcgttggcatgtcttggtggacgacccgcgctcgatgcagtcaaaaagggtctgcctcatgctcccgcattgatcaaaagaaccaaccggcggattcccgagagaacttcccatcgagtcgcgggatccaactcaaagaaaaggtcactggaggacaacgaaacggaaatcaaagtctccagagacacctggaacactaagaacatgcggtccctggaaccgccacgaagcaagaaacggatacatggcggagactacaaagaccatgacggtgattataaagatcatgacatcgactacaaggatgacgatgacaagtaa

SEQ ID NO: 271 - DNA, 19 bp, Artificial Sequence
  chemically synthesized
tcacgagggtgggccaggg

SEQ ID NO: 272 - DNA, 19 bp, Artificial Sequence
  chemically synthesized
tgtggtcggggtagcggct

SEQ ID NO: 273 - DNA, 19 bp, Artificial Sequence
  chemically synthesized
tgtggtcggggtagcggct

SEQ ID NO: 274 - DNA, 20 bp, Artificial Sequence
  chemically synthesized
ttcaagtccgccatgcccga

SEQ ID NO: 275 - protein, 34 aa, Artificial Sequence
  chemically synthesized
KKRNSNEYRLVPTKWQDYKKPGPNQKYTSDGKKR

SEQ ID NO: 276 - protein, 36 aa, Artificial Sequence
  chemically synthesized
KKRLHLIIADAELETVPPEILDHPAIVNYAKRRKKR

SEQ ID NO: 277 - protein, 29 aa, Artificial Sequence
  chemically synthesized
KKRIEELEIELGLRAPPKKEKKGKKSKKR

SEQ ID NO: 278 - protein, 26 aa, Artificial Sequence
  chemically synthesized
KKRALKYRLNPKLLKENNKKDVNKKR

SEQ ID NO: 279 - protein, 26 aa, Artificial Sequence
  chemically synthesized
KKRNFLESIEISINLKDVDLSDPKKR

SEQ ID NO: 280 - protein, 30 aa, Artificial Sequence
  chemically synthesized
KKRSEKSMALRLAGELSEAAEGRGGAMKKR

SEQ ID NO: 281 - protein, 30 aa, Artificial Sequence
  chemically synthesized
KKRFKLTGTGKIKRKHAFKSHILTKKSKKR

SEQ ID NO: 282 - protein, 30 aa, Artificial Sequence
  chemically synthesized
KKRNEHTMEERLAGELADAVNGRGTAVKKR

SEQ ID NO: 283 - protein, 30 aa, Artificial Sequence; identical to SEQ ID NO: 280
  chemically synthesized

SEQ ID NO: 284 - protein, 30 aa, Artificial Sequence
  chemically synthesized
KKRGEKSMSLRLANELMEATEGRGGAMKKR

SEQ ID NO: 285 - protein, 46 aa, Artificial Sequence
  chemically synthesized
KKRLATHNAGKGAKYTRYRLPVSLLYYEVFDSKEAAMSAEALFKKR

SEQ ID NO: 286 - protein, 30 aa, Artificial Sequence; identical to SEQ ID NO: 280
  chemically synthesized

SEQ ID NO: 287 - protein, 30 aa, Artificial Sequence; identical to SEQ ID NO: 280
  chemically synthesized

SEQ ID NO: 288 - protein, 30 aa, Artificial Sequence; identical to SEQ ID NO: 280
  chemically synthesized

SEQ ID NO: 289 - protein, 30 aa, Artificial Sequence; identical to SEQ ID NO: 280
  chemically synthesized

SEQ ID NO: 290 - protein, 30 aa, Artificial Sequence; identical to SEQ ID NO: 280
  chemically synthesized

SEQ ID NO: 291 - protein, 30 aa, Artificial Sequence
  chemically synthesized
KKRGEKSMAQRLANELLEAAEGRGGAMKKR

SEQ ID NO: 292 - protein, 30 aa, Artificial Sequence
  chemically synthesized
KKRFKVTGSGKIKRKHAFKSHILTKKSKKR

SEQ ID NO: 293 - protein, 44 aa, Artificial Sequence
  chemically synthesized
KKRKKYLKAAKGYRGALSRRYKLAKQMYVRSKWYSYVGRKLKKR

SEQ ID NO: 294 - protein, 30 aa, Artificial Sequence; identical to SEQ ID NO: 292
  chemically synthesized

SEQ ID NO: 295 - protein, 44 aa, Artificial Sequence
  chemically synthesized
KKRKKIMKAVKGYRGALSRRYRLAKQAYIKAKKHAYVGRKLKKR

SEQ ID NO: 296 - protein, 32 aa, Artificial Sequence
  chemically synthesized
KKRGYQTHGIRPRLAKKKTVMSKIARKQGKKR

SEQ ID NO: 297 - protein, 45 aa, Artificial Sequence
  chemically synthesized
KKRREKFLKSAKGYRGAIKRRYRLAKQHYYRAKWYAYAGRKLKKR

SEQ ID NO: 298 - protein, 37 aa, Artificial Sequence
  chemically synthesized
KKRIGLIFGGYSNEHEVSISSAKTVFQAFNSEINKKR

SEQ ID NO: 299 - protein, 30 aa, Artificial Sequence; identical to SEQ ID NO: 280
  chemically synthesized

SEQ ID NO: 300 - protein, 30 aa, Artificial Sequence
  chemically synthesized
KKRGEKSMDLRLAGELIDASEGRGAAMKKR

SEQ ID NO: 301 - protein, 46 aa, Artificial Sequence
  chemically synthesized
KKRFSFHALHLRLSPRLLKSEKAQRHTKEYTARLYRAFMRSVEKKR

SEQ ID NO: 302 - protein, 30 aa, Artificial Sequence
  chemically synthesized
KKRNEKTMEERLAKEILDASQGTGAAVKKR

SEQ ID NO: 303 - protein, 46 aa, Artificial Sequence
  chemically synthesized
KKRAMELGIDVITPKNINDEEVFDLLDKLNPDFIVVVAYGQLIKKR

SEQ ID NO: 304 - protein, 30 aa, Artificial Sequence; identical to SEQ ID NO: 280
  chemically synthesized

SEQ ID NO: 305 - protein, 44 aa, Artificial Sequence
  chemically synthesized
KKRKKYLKAAKGYRGALSRRYKLAKQMYVRSKWYSYVGRKQKKR

SEQ ID NO: 306 - protein, 42 aa, Artificial Sequence
  chemically synthesized
KKRRAILEAASGYRGQRSRLYRKAKEQVTHSLVYNYNDRKKR

SEQ ID NO: 307 - protein, 30 aa, Artificial Sequence; identical to SEQ ID NO: 291
  chemically synthesized

SEQ ID NO: 308 - protein, 30 aa, Artificial Sequence; identical to SEQ ID NO: 280
  chemically synthesized

SEQ ID NO: 309 - protein, 30 aa, Artificial Sequence; identical to SEQ ID NO: 280
  chemically synthesized

SEQ ID NO: 310 - protein, 30 aa, Artificial Sequence; identical to SEQ ID NO: 280
  chemically synthesized

SEQ ID NO: 311 - protein, 30 aa, Artificial Sequence
  chemically synthesized
KKRSEKSMALRLAGELLEASEGRGGAMKKR

SEQ ID NO: 312 - protein, 29 aa, Artificial Sequence
  chemically synthesized
KKRMKSIGTVEVPQEAFLAILKTDTSKKR

SEQ ID NO: 313 - protein, 30 aa, Artificial Sequence
  chemically synthesized
KKRSEKSMALRLAGELLEAAEGRGGAMKKR

SEQ ID NO: 314 - protein, 30 aa, Artificial Sequence; identical to SEQ ID NO: 280
  chemically synthesized

SEQ ID NO: 315 - protein, 42 aa, Artificial Sequence
  chemically synthesized
KKRILNKAKGYWGSRGTILTVAKHAVDKAEQYAYRDRRVKKR

SEQ ID NO: 316 - protein, 44 aa, Artificial Sequence
  chemically synthesized
KKRRKILKAVKGYHGALSRRYRLAKQAYIKAKKHAYVGRKLKKR

SEQ ID NO: 317 - protein, 26 aa, Artificial Sequence
  chemically synthesized
KKRGIGVKVNNGILWLLELQPEGKKR

SEQ ID NO: 318 - protein, 44 aa, Artificial Sequence
  chemically synthesized
KKRKKFLKEAKGYRGALSRRYKLAKQMYIRSKWYSYVGRKIKKR

SEQ ID NO: 319 - protein, 32 aa, Artificial Sequence
  chemically synthesized
KKRFSVTGSGKVRRLKAYKSHILTKMSGKKKR

SEQ ID NO: 320 - protein, 43 aa, Artificial Sequence
  chemically synthesized
KKRKYLKAAKGYRGALSRRYRLAKQYYIRSGVYAYVGRKQKKR

SEQ ID NO: 321 - protein, 42 aa, Artificial Sequence
  chemically synthesized
KKRRAILEQASGYRGQRSRLYRKAKEQVTHSLVYNYNDRKKR

SEQ ID NO: 322 - protein, 46 aa, Artificial Sequence; identical to SEQ ID NO: 285
  chemically synthesized

SEQ ID NO: 323 - protein, 46 aa, Artificial Sequence; identical to SEQ ID NO: 285
  chemically synthesized

SEQ ID NO: 324 - protein, 27 aa, Artificial Sequence
  chemically synthesized
KKRIPNTVFIFLVPPEKKALYDRLKKR

SEQ ID NO: 325 - protein, 46 aa, Artificial Sequence; identical to SEQ ID NO: 285
  chemically synthesized

SEQ ID NO: 326 - protein, 40 aa, Artificial Sequence
  chemically synthesized
KKRILDTLFTRSPKNQQDFIEHTDDKKSIVNFFVGAFKKR

SEQ ID NO: 327 - protein, 26 aa, Artificial Sequence
  chemically synthesized
KKRELQELNQIRRNLEQSNASLLKKR

SEQ ID NO: 328 - protein, 37 aa, Artificial Sequence
  chemically synthesized
KKRNHMAWVWGIVGLIQAPMPLICYYFFVIRPDRKKR

SEQ ID NO: 329 - protein, 40 aa, Artificial Sequence
  chemically synthesized
KKRLFEEQQEAKKIDYANSRIKAIKLIGAIIFFMKSSKKR

SEQ ID NO: 330 - protein, 28 aa, Artificial Sequence
  chemically synthesized
KKRKKIPGLAMIVIGNNPASLIYVNKKR

SEQ ID NO: 331 - protein, 27 aa, Artificial Sequence
  chemically synthesized
KKRPELLIAFGGCMAQLPEVRQKLKKR

SEQ ID NO: 332 - protein, 30 aa, Artificial Sequence; identical to SEQ ID NO: 280
  chemically synthesized

SEQ ID NO: 333 - protein, 30 aa, Artificial Sequence; identical to SEQ ID NO: 311
  chemically synthesized

SEQ ID NO: 334 - protein, 32 aa, Artificial Sequence
  chemically synthesized
KKRGYQKYGVRPRLAKKKTVMCKIARKQGKKR

SEQ ID NO: 335 - protein, 31 aa, Artificial Sequence
  chemically synthesized
KKRSSHSKKQRGNKSRGFDQKSQRVSKGKKR

SEQ ID NO: 336 - protein, 32 aa, Artificial Sequence; identical to SEQ ID NO: 334
  chemically synthesized

SEQ ID NO: 337 - protein, 31 aa, Artificial Sequence
  chemically synthesized
KKRSSHSKKQRGNKSRGFDQKSQRSSKGKKR

SEQ ID NO: 338 - protein, 30 aa, Artificial Sequence; identical to SEQ ID NO: 284
  chemically synthesized

SEQ ID NO: 339 - protein, 30 aa, Artificial Sequence; identical to SEQ ID NO: 280
  chemically synthesized

SEQ ID NO: 340 - protein, 44 aa, Artificial Sequence
  chemically synthesized
KKRRKLLKEARGYRGTKHTSYKRAKEQVWKSGVYAYVGRKQKKR

SEQ ID NO: 341 - protein, 30 aa, Artificial Sequence; identical to SEQ ID NO: 280
  chemically synthesized

SEQ ID NO: 342 - protein, 46 aa, Artificial Sequence; identical to SEQ ID NO: 285
  chemically synthesized

SEQ ID NO: 343 - protein, 46 aa, Artificial Sequence; identical to SEQ ID NO: 285
  chemically synthesized

SEQ ID NO: 344 - protein, 46 aa, Artificial Sequence; identical to SEQ ID NO: 285
  chemically synthesized

SEQ ID NO: 345 - protein, 46 aa, Artificial Sequence; identical to SEQ ID NO: 285
  chemically synthesized

SEQ ID NO: 346 - protein, 30 aa, Artificial Sequence; identical to SEQ ID NO: 313
  chemically synthesized

SEQ ID NO: 347 - protein, 30 aa, Artificial Sequence; identical to SEQ ID NO: 300
  chemically synthesized

SEQ ID NO: 348 - protein, 27 aa, Artificial Sequence
  chemically synthesized
KKRMPNTVFIFLVPPKKKDLYDRLKKR

SEQ ID NO: 349 - protein, 30 aa, Artificial Sequence; identical to SEQ ID NO: 280
  chemically synthesized

SEQ ID NO: 350 - protein, 30 aa, Artificial Sequence; identical to SEQ ID NO: 280
  chemically synthesized

SEQ ID NO: 351 - protein, 30 aa, Artificial Sequence; identical to SEQ ID NO: 280
  chemically synthesized

SEQ ID NO: 352 - protein, 45 aa, Artificial Sequence
  chemically synthesized
KKRKGMSNKKVLTGVVVATKCDKTIKVMVSRMVRHKTYKKIVKKR

SEQ ID NO: 353 - protein, 30 aa, Artificial Sequence; identical to SEQ ID NO: 311
  chemically synthesized

SEQ ID NO: 354 - protein, 46 aa, Artificial Sequence; identical to SEQ ID NO: 285
  chemically synthesized

SEQ ID NO: 355 - protein, 40 aa, Artificial Sequence
  chemically synthesized
KKRILDTFFKRNNSNHKDFVEHEEKRKSLLKIAINAFKKR

SEQ ID NO: 356 - protein, 44 aa, Artificial Sequence
  chemically synthesized
KKRDNTRLIHYEGTTRRGESYYVDVFSLMYPKMDILLEYASKKR

SEQ ID NO: 357 - protein, 30 aa, Artificial Sequence
  chemically synthesized
KKRFALTGTGKIKRKHAFHSHILTKKSKKR

SEQ ID NO: 358 - protein, 41 aa, Artificial Sequence
  chemically synthesized
KKRATVRIQGQTYKVVSSEEPAHVKEVASYMNKKMEELKKR

SEQ ID NO: 359 - protein, 46 aa, Artificial Sequence; identical to SEQ ID NO: 285
  chemically synthesized

SEQ ID NO: 360 - protein, 30 aa, Artificial Sequence; identical to SEQ ID NO: 280
  chemically synthesized

SEQ ID NO: 361 - protein, 30 aa, Artificial Sequence; identical to SEQ ID NO: 280
  chemically synthesized

SEQ ID NO: 362 - protein, 30 aa, Artificial Sequence; identical to SEQ ID NO: 357
  chemically synthesized

SEQ ID NO: 363 - protein, 30 aa, Artificial Sequence
  chemically synthesized
KKREFETQGRKPHWRFLLPNFENDPLQKKR

SEQ ID NO: 364 - protein, 46 aa, Artificial Sequence
  chemically synthesized
KKRKIIALCGIDTRALTVLIREKGALNGIIAHDPNGNFDINTLKKR

SEQ ID NO: 365 - protein, 36 aa, Artificial Sequence
  chemically synthesized
KKRSRGVGSEGPAVFREKSTTQVDVEARKSQKDKKR

SEQ ID NO: 366 - protein, 42 aa, Artificial Sequence
  chemically synthesized
KKRLFKLAKGFVGDRKNHLRLTSGAVMRAMAYNYAHRKQKKR

SEQ ID NO: 367 - protein, 36 aa, Artificial Sequence
  chemically synthesized
KKRFERKKEASPADTPPESDSTTENASVEKKAEKKR

SEQ ID NO: 368 - protein, 27 aa, Artificial Sequence
  chemically synthesized
KKRLDKEGVMKSVKAHRFYSKPSIKKR

SEQ ID NO: 369 - protein, 45 aa, Artificial Sequence
  chemically synthesized
KKRPEQGRIAALYSDIVILADEDPRGEDSVELLEMIAAGCPEKKR

SEQ ID NO: 370 - protein, 36 aa, Artificial Sequence
  chemically synthesized
KKRSLPNLRTVRVKLEDGTTVKLRVAASTLRTMKKR

SEQ ID NO: 371 - protein, 30 aa, Artificial Sequence
  chemically synthesized
KKRFRLSAKGKAMHRQSGTSHLAKGLSKKR

SEQ ID NO: 372 - protein, 30 aa, Artificial Sequence; identical to SEQ ID NO: 300
  chemically synthesized

SEQ ID NO: 373 - protein, 30 aa, Artificial Sequence; identical to SEQ ID NO: 300
  chemically synthesized

SEQ ID NO: 374 - protein, 30 aa, Artificial Sequence; identical to SEQ ID NO: 300
  chemically synthesized

SEQ ID NO: 375 - protein, 42 aa, Artificial Sequence; identical to SEQ ID NO: 306
  chemically synthesized

SEQ ID NO: 376 - protein, 42 aa, Artificial Sequence
  chemically synthesized
KKRIQYNERLEFLGDSVLQLVITEYLFMNYKDKSEGELSKKR

SEQ ID NO: 377 - protein, 30 aa, Artificial Sequence
  chemically synthesized
KKRFTLTGTGKIKRKHAFHSHILTKKSKKR

SEQ ID NO: 378 - protein, 43 aa, Artificial Sequence
  chemically synthesized
KKRDLENCSYQASGISVVSHPKNPYVPTSHLNIRFFLAKNKKR

SEQ ID NO: 379 - protein, 26 aa, Artificial Sequence
  chemically synthesized
KKRRDFLKNNHVSFLISIHADSSKKR

SEQ ID NO: 380 - protein, 46 aa, Artificial Sequence; identical to SEQ ID NO: 285
  chemically synthesized

SEQ ID NO: 381 - protein, 32 aa, Artificial Sequence; identical to SEQ ID NO: 334
  chemically synthesized

SEQ ID NO: 382 - protein, 31 aa, Artificial Sequence
  chemically synthesized
KKRSSHSKKQRGNKSRGFDQKSQRGSKGKKR

SEQ ID NO: 383 - protein, 30 aa, Artificial Sequence; identical to SEQ ID NO: 311
  chemically synthesized

SEQ ID NO: 384 - protein, 30 aa, Artificial Sequence
  chemically synthesized
KKREIFTSIFEDKIDLKLFSFLIILIEKKR

SEQ ID NO: 385 - protein, 31 aa, Artificial Sequence
  chemically synthesized
KKRARRPGVPTRGDKKRAPRLGVPARGDKKR

SEQ ID NO: 386 - protein, 31 aa, Artificial Sequence
  chemically synthesized
KKRAPRLGVPARGDKKRARRPGVPAREDKKR

SEQ ID NO: 387 - protein, 31 aa, Artificial Sequence
  chemically synthesized
KKRARRPGVPAREDKKRAPRPGVPTRGDKKR

SEQ ID NO: 388 - protein, 31 aa, Artificial Sequence
  chemically synthesized
KKRAPRPGVPTRGDKKRAPRLGVPARGDKKR

SEQ ID NO: 389 - protein, 45 aa, Artificial Sequence
  chemically synthesized
KKRARRPGVPTRGDKKRAPRLGVPARGDKKRARRPGVPAREDKKR

SEQ ID NO: 390 - protein, 45 aa, Artificial Sequence
  chemically synthesized
KKRAPRLGVPARGDKKRARRPGVPAREDKKRAPRPGVPTRGDKKR

SEQ ID NO: 391 - protein, 45 aa, Artificial Sequence
  chemically synthesized
KKRARRPGVPAREDKKRAPRPGVPTRGDKKRAPRLGVPARGDKKR

SEQ ID NO: 392 - protein, 44 aa, Artificial Sequence; identical to SEQ ID NO: 305
  chemically synthesized

SEQ ID NO: 393 - protein, 45 aa, Artificial Sequence
  chemically synthesized
KKRTSVPDDDFVFTLSDDENDVLENGADEGDEQADEETASGSKKR

SEQ ID NO: 394 - protein, 38 aa, Artificial Sequence
  chemically synthesized
KKRAAAKDDDFVLTLSDDENDVLENGVEEDTLSSSKKR

SEQ ID NO: 395 - protein, 42 aa, Artificial Sequence
  chemically synthesized
KKRLQKQAKEEERARREAEKAAEEAAAKAEQEKKLEEQRKKR

SEQ ID NO: 396 - protein, 45 aa, Artificial Sequence
  chemically synthesized
KKRANADDDFVLTLSDDENDTLNQLEEEGEGDDGALATGSKTKKR

SEQ ID NO: 397 - protein, 44 aa, Artificial Sequence
  chemically synthesized
KKRAQETKIDSKESVKESPKQENSILKRLASSIKKQELPFTKKR

SEQ ID NO: 398 - protein, 46 aa, Artificial Sequence
  chemically synthesized
KKRSAEEEEKDLKKIMMTNKQRKLYNKMQYGINKKETRQDELAKKR

SEQ ID NO: 399 - protein, 35 aa, Artificial Sequence
  chemically synthesized
KKRKAHEERKEEKRSYKKTKSDRSAPKTKAKSKKR

SEQ ID NO: 400 - protein, 41 aa, Artificial Sequence
  chemically synthesized
KKRTIDKVDDSVEDGAEKKPEAAVKNDGETAEKPEKKHKKR

SEQ ID NO: 401 - protein, 39 aa, Artificial Sequence
  chemically synthesized
KKRKANEERKEEGKERSYKKTKADRTKLKTKAKSSSKKR

SEQ ID NO: 402 - protein, 26 aa, Artificial Sequence
  chemically synthesized
KKRAAQKKKEEEELERQKMMMSRKKR

SEQ ID NO: 403 - protein, 38 aa, Artificial Sequence
  chemically synthesized
KKRKREIERLEKMTDEEKKEEQAKEKELQDLIEQVKKR

SEQ ID NO: 404 - protein, 26 aa, Artificial Sequence
  chemically synthesized
KKRGHNSIIGHEKTNALETLKKKKKR

SEQ ID NO: 405 - protein, 43 aa, Artificial Sequence
  chemically synthesized
KKRSAKIKKATFDANKKKEVGVSDLTLLSKISDESINENLKKR

SEQ ID NO: 406 - protein, 37 aa, Artificial Sequence
  chemically synthesized
KKRKAREILDKHRKEEKELVKEGKTPYYLKKAEQKKR

SEQ ID NO: 407 - protein, 39 aa, Artificial Sequence
  chemically synthesized
KKRTHDELEQDGKEEEEKKEGEKPSSQNRAERDEPEKKR

SEQ ID NO: 408 - protein, 35 aa, Artificial Sequence
  chemically synthesized
KKRSLEDNETEIKVSRDTWNTKNMRSLEPPRSKKR

SEQ ID NO: 409 - protein, 35 aa, Artificial Sequence; identical to SEQ ID NO: 408
  chemically synthesized

SEQ ID NO: 410 - protein, 45 aa, Artificial Sequence
  chemically synthesized
KKRLPQAKRACAKCQKDNKKCDDARPCQRCIKAKTDCIDLPRKKR

SEQ ID NO: 411 - protein, 26 aa, Artificial Sequence
  chemically synthesized
KKRNSEEANDENDETNLKIPIPEKKR

SEQ ID NO: 412 - protein, 37 aa, Artificial Sequence
  chemically synthesized
KKRKVNELSQDVISLHSPKESNARKTKKNKNKKKKKR

SEQ ID NO: 413 - protein, 34 aa, Artificial Sequence
  chemically synthesized
KKRKSKSKQESSDSGVSEDDEIPLSDARNKTKKR

SEQ ID NO: 414 - protein, 45 aa, Artificial Sequence
  chemically synthesized
KKRKLKDTVSNCEFTEEDSESSFLLETIQPTKSTLRRSISPLKKR

SEQ ID NO: 415 - protein, 35 aa, Artificial Sequence
  chemically synthesized
KKRAEKKEQQKEKKKEKEKERMKAFIPPEESSKKR

SEQ ID NO: 416 - protein, 35 aa, Artificial Sequence
  chemically synthesized
KKRSANELAIDDQDTKESTDLAGTEDSAPKANKKR

SEQ ID NO: 417 - protein, 44 aa, Artificial Sequence
  chemically synthesized
KKRLTYSELFHKTQELNEELQSCLQKILEASADRNESKQDAKKR

SEQ ID NO: 418 - protein, 31 aa, Artificial Sequence
  chemically synthesized
KKRTKIQCSHFDLLVKLGQGGYGSVWLAKKR

SEQ ID NO: 419 - protein, 35 aa, Artificial Sequence
  chemically synthesized
KKRKSKLVEMTPKGLKKRKRVQIQEGSVSTNTKKR

SEQ ID NO: 420 - protein, 42 aa, Artificial Sequence
  chemically synthesized
KKRNVEEQNLIEQSITESQRIFSEKQRLEQERFNRELLEKKR

SEQ ID NO: 421 - protein, 35 aa, Artificial Sequence; identical to SEQ ID NO: 408
  chemically synthesized

SEQ ID NO: 422 - protein, 35 aa, Artificial Sequence; identical to SEQ ID NO: 408
  chemically synthesized

SEQ ID NO: 423 - protein, 35 aa, Artificial Sequence; identical to SEQ ID NO: 408
  chemically synthesized

SEQ ID NO: 424 - protein, 35 aa, Artificial Sequence; identical to SEQ ID NO: 408
  chemically synthesized

SEQ ID NO: 425 - protein, 35 aa, Artificial Sequence; identical to SEQ ID NO: 408
  chemically synthesized

SEQ ID NO: 426 - protein, 35 aa, Artificial Sequence; identical to SEQ ID NO: 408
  chemically synthesized

SEQ ID NO: 427 - protein, 35 aa, Artificial Sequence; identical to SEQ ID NO: 408
  chemically synthesized

SEQ ID NO: 428 - protein, 35 aa, Artificial Sequence; identical to SEQ ID NO: 408
  chemically synthesized

SEQ ID NO: 429 - protein, 35 aa, Artificial Sequence
  chemically synthesized
KKRSLEDNETEIEVSRDTWNNKNMRSLEPPRSKKR

SEQ ID NO: 430 - protein, 35 aa, Artificial Sequence; identical to SEQ ID NO: 429
  chemically synthesized

SEQ ID NO: 431 - protein, 40 aa, Artificial Sequence
  chemically synthesized
KKRVEKLDWMYAAPSTEGGALGGARIGERDMEEYLLGKKR

SEQ ID NO: 432 - protein, 40 aa, Artificial Sequence; identical to SEQ ID NO: 431
  chemically synthesized

SEQ ID NO: 433 - protein, 35 aa, Artificial Sequence; identical to SEQ ID NO: 429
  chemically synthesized

SEQ ID NO: 434 - protein, 35 aa, Artificial Sequence; identical to SEQ ID NO: 429
  chemically synthesized

SEQ ID NO: 435 - protein, 29 aa, Artificial Sequence
  chemically synthesized
KKRKRRSKKINKLTDGQIRINHVSSEKKR

SEQ ID NO: 436 - protein, 37 aa, Artificial Sequence
  chemically synthesized
KKRSKLTSKHAETADSQSSAASSDHESGQSQAHTKKR

SEQ ID NO: 437 - protein, 39 aa, Artificial Sequence
  chemically synthesized
KKRDAETADIGDQSEVESDTEELKKIMFGEKKKLNKKKR

SEQ ID NO: 438 - protein, 29 aa, Artificial Sequence
  chemically synthesized
KKRAGGTKRKKATAEPSDNDILSQMTKKR

SEQ ID NO: 439 - protein, 35 aa, Artificial Sequence; identical to SEQ ID NO: 429
  chemically synthesized

SEQ ID NO: 440 - protein, 33 aa, Artificial Sequence
  chemically synthesized
KKRVYYDDGLTEEQFLEAVEDDNMSLEDAIKKR

SEQ ID NO: 441 - protein, 43 aa, Artificial Sequence
  chemically synthesized
KKRSAKIKKATFDANKKKEVGISDLTLLSKISDESINENLKKR

SEQ ID NO: 442 - protein, 37 aa, Artificial Sequence
  chemically synthesized
KKRKRLESEQEQDQDEIASDSDMEDIDSDLENNSKKR

SEQ ID NO: 443 - protein, 26 aa, Artificial Sequence
  chemically synthesized
KKRGHNSIIGHEKTNALETLKKKKKR

SEQ ID NO: 444 - protein, 35 aa, Artificial Sequence; identical to SEQ ID NO: 408
  chemically synthesized

SEQ ID NO: 445 - protein, 35 aa, Artificial Sequence; identical to SEQ ID NO: 408
  chemically synthesized

SEQ ID NO: 446 - protein, 35 aa, Artificial Sequence
  chemically synthesized
KKRAHSSGERRSSVSKPARDPSDKPEESPSKKKKR

SEQ ID NO: 447 - protein, 42 aa, Artificial Sequence
  chemically synthesized
KKRLKSSLRFRKLEILLELPFFIPFEERVDLFYMFIALDKKR

SEQ ID NO: 448 - protein, 35 aa, Artificial Sequence
  chemically synthesized
KKRMQAVFTNVHKFKPDASRDESKETYYIGLKKKR

SEQ ID NO: 449 - protein, 35 aa, Artificial Sequence
  chemically synthesized
KKRKPTEVNDSENNSSEEDKKKGQNVTSETHSKKR

SEQ ID NO: 450 - protein, 42 aa, Artificial Sequence
  chemically synthesized
KKREAEAQWCRIHGQSCWKRDALPEAEPQWCRIHGQSCWKKR

SEQ ID NO: 451 - protein, 35 aa, Artificial Sequence; identical to SEQ ID NO: 408
  chemically synthesized

SEQ ID NO: 452 - protein, 35 aa, Artificial Sequence; identical to SEQ ID NO: 429
  chemically synthesized

SEQ ID NO: 453 - protein, 35 aa, Artificial Sequence; identical to SEQ ID NO: 408
  chemically synthesized

SEQ ID NO: 454 - protein, 35 aa, Artificial Sequence; identical to SEQ ID NO: 408
  chemically synthesized

SEQ ID NO: 455 - protein, 45 aa, Artificial Sequence
  chemically synthesized
KKRKDPDSDDWSESNSKENKIDNKHLNLLSSDSEIEQDYQKAKKR

SEQ ID NO: 456 - protein, 35 aa, Artificial Sequence; identical to SEQ ID NO: 408
  chemically synthesized

SEQ ID NO: 457 - protein, 35 aa, Artificial Sequence; identical to SEQ ID NO: 408
  chemically synthesized

SEQ ID NO: 458 - protein, 35 aa, Artificial Sequence
  chemically synthesized
KKRVIDDEDDKEVDTTLPGWGEWAGAGSKPKNKKR

SEQ ID NO: 459 - protein, 35 aa, Artificial Sequence; identical to SEQ ID NO: 408
  chemically synthesized

SEQ ID NO: 460 - protein, 35 aa, Artificial Sequence; identical to SEQ ID NO: 408
  chemically synthesized

SEQ ID NO: 461 - protein, 26 aa, Artificial Sequence
  chemically synthesized
KKRRRGNGKHLSRKEKRKMERADKKR

SEQ ID NO: 462 - protein, 35 aa, Artificial Sequence; identical to SEQ ID NO: 408
  chemically synthesized

SEQ ID NO: 463 - protein, 40 aa, Artificial Sequence
  chemically synthesized
KKRNGSMHNMYYASVPFLLFSNAYSIDFSRHVNEFLEKKR

SEQ ID NO: 464 - protein, 35 aa, Artificial Sequence; identical to SEQ ID NO: 429
  chemically synthesized

SEQ ID NO: 465 - protein, 35 aa, Artificial Sequence; identical to SEQ ID NO: 408
  chemically synthesized

SEQ ID NO: 466 - protein, 28 aa, Artificial Sequence
  chemically synthesized
KKRYMTTKQTRTVQNQTMPRSNTTTKKR

SEQ ID NO: 467 - protein, 37 aa, Artificial Sequence
  chemically synthesized
KKREFEAAPAKTYADFLRAYQSWNTFVNPDRPNLKKR

SEQ ID NO: 468 - protein, 37 aa, Artificial Sequence
  chemically synthesized
KKREFEAAPEKSYADFLRAYHSWNTFVNPDRPNLKKR

SEQ ID NO: 469 - protein, 37 aa, Artificial Sequence; identical to SEQ ID NO: 467
  chemically synthesized

SEQ ID NO: 470 - protein, 46 aa, Artificial Sequence
  chemically synthesized
KKRDKKKQLKLAKEEERQRREAERLAEQAAQKALEAKRQEEARKKR

SEQ ID NO: 471 - protein, 26 aa, Artificial Sequence
  chemically synthesized
KKREALLNIEEGRDVKGNRMVGMKKR

SEQ ID NO: 472 - protein, 35 aa, Artificial Sequence; identical to SEQ ID NO: 408
  chemically synthesized

SEQ ID NO: 473 - protein, 35 aa, Artificial Sequence; identical to SEQ ID NO: 408
  chemically synthesized

SEQ ID NO: 474 - protein, 35 aa, Artificial Sequence; identical to SEQ ID NO: 429
  chemically synthesized

SEQ ID NO: 475 - protein, 35 aa, Artificial Sequence; identical to SEQ ID NO: 408
  chemically synthesized

SEQ ID NO: 476 - protein, 35 aa, Artificial Sequence; identical to SEQ ID NO: 408
  chemically synthesized

SEQ ID NO: 477 - protein, 35 aa, Artificial Sequence; identical to SEQ ID NO: 408
  chemically synthesized

SEQ ID NO: 478 - protein, 35 aa, Artificial Sequence; identical to SEQ ID NO: 408
  chemically synthesized

SEQ ID NO: 479 - protein, 35 aa, Artificial Sequence; identical to SEQ ID NO: 408
  chemically synthesized

SEQ ID NO: 480 - protein, 35 aa, Artificial Sequence; identical to SEQ ID NO: 429
  chemically synthesized

SEQ ID NO: 481 - protein, 41 aa, Artificial Sequence
  chemically synthesized
KKRKLGPKAPNPLSVKKKKKVNSPSDEVKDKEDTSKEKKKR

SEQ ID NO: 482 - protein, 35 aa, Artificial Sequence; identical to SEQ ID NO: 408
  chemically synthesized

SEQ ID NO: 483 - protein, 35 aa, Artificial Sequence; identical to SEQ ID NO: 429
  chemically synthesized

SEQ ID NO: 484 - protein, 35 aa, Artificial Sequence; identical to SEQ ID NO: 408
  chemically synthesized

SEQ ID NO: 485 - protein, 35 aa, Artificial Sequence; identical to SEQ ID NO: 429
  chemically synthesized

SEQ ID NO: 486 - protein, 35 aa, Artificial Sequence; identical to SEQ ID NO: 429
  chemically synthesized

SEQ ID NO: 487 - protein, 31 aa, Artificial Sequence
  chemically synthesized
KKRKGGNGSSDEEEDSDDDMAGKDKGKRKKR

SEQ ID NO: 488 - protein, 45 aa, Artificial Sequence
  chemically synthesized
KKRKRKHGGSGNAALTSANAAKSLVKTTLSSKGEASAEKQEMKKR

SEQ ID NO: 489 - protein, 26 aa, Artificial Sequence
  chemically synthesized
KKRKADRRSDKEDDKLGKKEKKSKKR

SEQ ID NO: 490 - protein, 44 aa, Artificial Sequence
  chemically synthesized
KKRDKKEKKERRDKKEKKEKRRIEKAAAESGAETGDSISEEKKR

SEQ ID NO: 491 - protein, 46 aa, Artificial Sequence
  chemically synthesized
KKRTAPKDDDFVLTLSDDENDVFSGINEDGDDHLDEETAKSTTKKR

SEQ ID NO: 492 - protein, 42 aa, Artificial Sequence
  chemically synthesized
KKRVDEAREKRVGRFRDGMGSKKELKGREDIRKARIEKEKKR

SEQ ID NO: 493 - protein, 34 aa, Artificial Sequence
  chemically synthesized
KKRIDRVDWMYATPATTGSGSAAEMEDYLLGKKR

SEQ ID NO: 494 - protein, 34 aa, Artificial Sequence
  chemically synthesized
KKRKTSDRETQNVTTKKQKIETIERKKSSLKKKR

SEQ ID NO: 495 - protein, 45 aa, Artificial Sequence
  chemically synthesized
KKRAAARDDDFVLTLSDDENDIFENGVEEDGDNAQEDTLSSSKKR

SEQ ID NO: 496 - protein, 42 aa, Artificial Sequence; identical to SEQ ID NO: 395
  chemically synthesized

SEQ ID NO: 497 - protein, 41 aa, Artificial Sequence
  chemically synthesized
KKRLQQLAKEEERKRKEEELKAKEEEQRLQKEKLKAEQKKR

SEQ ID NO: 498 - protein, 37 aa, Artificial Sequence
  chemically synthesized
KKRSEIERYSKMFWQNYQKIEGYEKYLSQIEAVEKKR

SEQ ID NO: 499 - protein, 27 aa, Artificial Sequence
  chemically synthesized
KKRVAPLLVSTSAAPKNVLQKPLEKKR

SEQ ID NO: 500 - protein, 26 aa, Artificial Sequence
  chemically synthesized
KKRAAKKRQEEEELERQKMMMSRKKR

SEQ ID NO: 501 - protein, 46 aa, Artificial Sequence
  chemically synthesized
KKRSAEDEEKDLKKIMMSNKQRKLYKKMQYGIDKKEARQDDLTKKR

SEQ ID NO: 502 - protein, 44 aa, Artificial Sequence
  chemically synthesized
KKRGSEAVEESDSDSEESESESDDDKKSRKSSKKEKKDKKSKKR

SEQ ID NO: 503 - protein, 41 aa, Artificial Sequence
  chemically synthesized
KKRAEKSRTPLTSSTAVISDRPVASVSADTTLVGSVASKKR

SEQ ID NO: 504 - protein, 34 aa, Artificial Sequence
  chemically synthesized
KKRFSGSSVTVAMTTAAAAAARLTAFKVTKPKKR

SEQ ID NO: 505 - protein, 28 aa, Artificial Sequence
  chemically synthesized
KKREVGVSDLTLLSKVSEEAINENLKKR

SEQ ID NO: 506 - protein, 33 aa, Artificial Sequence
  chemically synthesized
KKRLKRTKVPSKIWVDNLNMEYIYAKGESIKKR

SEQ ID NO: 507 - protein, 39 aa, Artificial Sequence
  chemically synthesized
KKRYKSELDRAEAIERQLIREEEHLKSLQEKGETQAKKR

SEQ ID NO: 508 - protein, 41 aa, Artificial Sequence
  chemically synthesized
KKRKLEVKSDQQTPPATQSEINHTSSVRLEENIQGIKRKKR

SEQ ID NO: 509 - protein, 39 aa, Artificial Sequence
  chemically synthesized
KKRGQAAKEAVEVDLVDVGDYVKKATERFQHTVELHKKR

SEQ ID NO: 510 - protein, 33 aa, Artificial Sequence
  chemically synthesized
KKRQRKRRREAGSGDEEDEGVSDEVLAARAKKR

SEQ ID NO: 511 - protein, 42 aa, Artificial Sequence
  chemically synthesized
KKRVAEAKEKRIGKYKDGEGSKRELKTATDIRKARAVAEKKR

SEQ ID NO: 512 - protein, 34 aa, Artificial Sequence
  chemically synthesized
KKRDPPPRPKYEVFTDAQLSREIASYGFKPIKKR

SEQ ID NO: 513 - protein, 39 aa, Artificial Sequence
  chemically synthesized
KKRGISALMAKAKEASDVATNGYFKHWDGGVSEDDEKKR

SEQ ID NO: 514 - protein, 28 aa, Artificial Sequence
  chemically synthesized
KKRQSKRLTTRKREGMLKRARANERKKR

SEQ ID NO: 515 - protein, 27 aa, Artificial Sequence
  chemically synthesized
KKRKKKTVKELNRIRRASRISKKEKKR

SEQ ID NO: 516 - protein, 38 aa, Artificial Sequence
  chemically synthesized
KKRKKKTVKELNRIRRASRISKKEKKRIFKRYIGMKKR

SEQ ID NO: 517 - protein, 35 aa, Artificial Sequence; identical to SEQ ID NO: 408
  chemically synthesized

SEQ ID NO: 518 - protein, 41 aa, Artificial Sequence
  chemically synthesized
KKRTGSQYSYYNGGHNVESTNENKLVDASDLLANVDILKKR

SEQ ID NO: 519 - protein, 35 aa, Artificial Sequence; identical to SEQ ID NO: 408
  chemically synthesized

SEQ ID NO: 520 - protein, 35 aa, Artificial Sequence; identical to SEQ ID NO: 408
  chemically synthesized

SEQ ID NO: 521 - protein, 40 aa, Artificial Sequence
  chemically synthesized
KKRVWSREKRLLSEMAITNHSPLLNVDDYRKFREDLWKKR

SEQ ID NO: 522 - protein, 33 aa, Artificial Sequence
  chemically synthesized
KKRKRRAKAAEREAQEAEELSMELGLDENLKKR

SEQ ID NO: 523 - protein, 35 aa, Artificial Sequence
  chemically synthesized
KKRRRSSSYSPSPVKKKKKKSSKKHKRRRSFSKKR

SEQ ID NO: 524 - protein, 40 aa, Artificial Sequence
  chemically synthesized
KKRKKPKGKETFEPEDKTVKQEQINTEPLEDTVLSPTKKR

SEQ ID NO: 525 - protein, 42 aa, Artificial Sequence
  chemically synthesized
KKRKKQSQESRMPETVPQEEMPGPPLNSESGEEAPTGRDKKR

SEQ ID NO: 526 - protein, 43 aa, Artificial Sequence
  chemically synthesized
KKRKRQKGTEGMEPEEGVTVESQPQVKVEPLEEAIPLPPTKKR

SEQ ID NO: 527 - protein, 26 aa, Artificial Sequence
  chemically synthesized
KKRKLDPEIVPEEKDCGDAEGNSKKR

SEQ ID NO: 528 - protein, 46 aa, Artificial Sequence
  chemically synthesized
KKRSSIWQFFSRLFSSSSNTTKKPEPPVNLKYNAPTSHVTPSVKKR

SEQ ID NO: 529 - protein, 36 aa, Artificial Sequence
  chemically synthesized
KKRRAPPPPGSGPPVQDKASEKVSLGSQIDLQKKKR

SEQ ID NO: 530 - protein, 37 aa, Artificial Sequence
  chemically synthesized
KKRQRSESRSASEHSSSAESERSYKKSKKHKKKSKKR

SEQ ID NO: 531 - protein, 32 aa, Artificial Sequence
  chemically synthesized
KKRKALEFVTNPDIAAKKKMKKHKNKSEAKKR

SEQ ID NO: 532 - protein, 45 aa, Artificial Sequence
  chemically synthesized
KKRFRQLSILVHPDKNQDDADRAQKAFEAVDKAYKLLLDQEQKKR

SEQ ID NO: 533 - protein, 45 aa, Artificial Sequence
  chemically synthesized
KKRQQARKTASVLSKDDVAPESGDTTVKKPESKKEQTPEHGKKKR

SEQ ID NO: 534 - protein, 42 aa, Artificial Sequence
  chemically synthesized
KKRARLEEENEELRQRLIETELAKQVLQTELERPREHSLKKR

SEQ ID NO: 535 - protein, 35 aa, Artificial Sequence
  chemically synthesized
KKRRHRSKVNGLQRGRKKDRPRKHLTLNNKVQKKR

SEQ ID NO: 536 - protein, 30 aa, Artificial Sequence
  chemically synthesized
KKRRKEKKVKHKKKGKKQKHCRRHKQTKKR

SEQ ID NO: 537 - protein, 26 aa, Artificial Sequence
  chemically synthesized
KKRPRNSYKCGTNTMEREESEQTKKR

SEQ ID NO: 538 - protein, 35 aa, Artificial Sequence
  chemically synthesized
KKRQTQSESSNYDSELEKEIKSMSKIGAARTTKKR

SEQ ID NO: 539 - protein, 41 aa, Artificial Sequence
  chemically synthesized
KKRGRKPGSVVAAAAAEAKKKAVKESSIRSVQETVLPIKKR

SEQ ID NO: 540 - protein, 27 aa, Artificial Sequence
  chemically synthesized
KKRGDGFVNESRLQKIVSVIDEEIKKR

SEQ ID NO: 541 - protein, 27 aa, Artificial Sequence
  chemically synthesized
KKRKERFGIVTSSAGTGTTEDTEAKKR

SEQ ID NO: 542 - protein, 40 aa, Artificial Sequence
  chemically synthesized
KKRKREESVEQKRSKQNATKLSALLFKHKEQLRAEILKKR

SEQ ID NO: 543 - protein, 33 aa, Artificial Sequence
  chemically synthesized
KKRKEEERKKKETDQKKEAVAPVQEESDLEKKR

SEQ ID NO: 544 - protein, 43 aa, Artificial Sequence
  chemically synthesized
KKRHKSSSSSSSSSSDSDSSSDSQSSSDSSDSESATEEKSKKR

SEQ ID NO: 545 - protein, 34 aa, Artificial Sequence
  chemically synthesized
KKRKKDFQHLISSPLKKSRICDETANATSTLKKR

SEQ ID NO: 546 - protein, 37 aa, Artificial Sequence
  chemically synthesized
KKRKKDFQHLISSPLKKSRICDETANATSTLKKRKKR

SEQ ID NO: 547 - protein, 45 aa, Artificial Sequence
  chemically synthesized
KKRDQTASAPATPLVNKHRPTFTRSNTISKPYISNTLPSDAPKKR

SEQ ID NO: 548 - protein, 36 aa, Artificial Sequence
  chemically synthesized
KKRKNKSSKRKHRKYSDSDSNSESDTNSDSDDDKKR

SEQ ID NO: 549 - protein, 39 aa, Artificial Sequence
  chemically synthesized
KKRRQKEEEEATASERNDADEKHPEHAEQNIRKSKKKKR

SEQ ID NO: 550 - protein, 46 aa, Artificial Sequence
  chemically synthesized
KKRQQQEEEDLNLEDRGEETVLGGGTREAESRACSDGRSRKSKKKR

SEQ ID NO: 551 - protein, 38 aa, Artificial Sequence
  chemically synthesized
KKRIELKHDKKARAMAKRTKDNFHGYNGIPIEEKSKKR

SEQ ID NO: 552 - protein, 41 aa, Artificial Sequence
  chemically synthesized
KKRIERFYNCLQHALERETMTNLHPKIKEKNNSSYIHKKKR

SEQ ID NO: 553 - protein, 26 aa, Artificial Sequence
  chemically synthesized
KKRRKGSGSEQEGEDEEGGERKKKKR

SEQ ID NO: 554 - protein, 27 aa, Artificial Sequence
  chemically synthesized
KKRRRHPKGEEGSDDDETENGPKPKKR

SEQ ID NO: 555 - protein, 37 aa, Artificial Sequence
  chemically synthesized
KKRGGGGGRRSKKGGEFDEFVNDDTDDDLPISKKKKR

SEQ ID NO: 556 - protein, 36 aa, Artificial Sequence
  chemically synthesized
KKRTALHLACANGNSEVVSLLLDRQCQLHVFDSKKR

SEQ ID NO: 557 - protein, 39 aa, Artificial Sequence
  chemically synthesized
KKRKRKEEGEKEKKPRKKVPKQLGVVALNSHKSEKKKKR

SEQ ID NO: 558 - protein, 46 aa, Artificial Sequence
  chemically synthesized
KKRLDGIEEVEREITRGRSRKGSELTCPEDNKIKELTLEIERLKKR

SEQ ID NO: 559 - protein, 33 aa, Artificial Sequence
  chemically synthesized
KKRKKSYPDDKPLSSESSSESDYEEDVQAKKKR

SEQ ID NO: 560 - protein, 43 aa, Artificial Sequence
  chemically synthesized
KKRKALEAKKEEEEIQREMVKLRREIIERRRTVKAAWKIEKKR

SEQ ID NO: 561 - protein, 37 aa, Artificial Sequence
  chemically synthesized
KKRKRCGVCEPCQQKTNCGECTYCKNRKNSHQICKKR

SEQ ID NO: 562 - protein, 39 aa, Artificial Sequence
  chemically synthesized
KKRMEAEQEMVRMVRAATLIQALWKGYLVRSLLRSKKKR

SEQ ID NO: 563 - protein, 31 aa, Artificial Sequence
  chemically synthesized
KKRGRTPKTLISHPISAPSKTAEPLKFPKKR

SEQ ID NO: 564 - protein, 27 aa, Artificial Sequence
  chemically synthesized
KKRVGDGSVLRTIHGKEMSKIARKKKR

SEQ ID NO: 565 - protein, 35 aa, Artificial Sequence
  chemically synthesized
KKRKDEGKSRTTLPERPLTEVKAETRAEEAPEKKR

SEQ ID NO: 566 - protein, 32 aa, Artificial Sequence
  chemically synthesized
KKRKSEDGTPAEDGTPAATGGSQPPSMGRKKR

SEQ ID NO: 567 - protein, 35 aa, Artificial Sequence
  chemically synthesized
KKRKKRKSEDGTPAEDGTPAATGGSQPPSMGRKKR

SEQ ID NO: 568 - protein, 33 aa, Artificial Sequence
  chemically synthesized
KKRKKISGPNPLSCLKKKKKAPDTQSSASEKKR

SEQ ID NO: 569 - protein, 32 aa, Artificial Sequence
  chemically synthesized
KKRSREDAGDNDDTEGAIGVRNKVAGGKMKKR

SEQ ID NO: 570 - protein, 42 aa, Artificial Sequence
  chemically synthesized
KKRKGSSSQAPASKKLNKEELPVIPKGKPKSGRVWKDRSKKR

SEQ ID NO: 571 - protein, 44 aa, Artificial Sequence
  chemically synthesized
KKRSKLKHRDLEVSCEPDGFEMNFQCAPPLPSDTDQPQETVKKR

SEQ ID NO: 572 - protein, 45 aa, Artificial Sequence
  chemically synthesized
KKRRKKSAGERLKEEKPKKSKTSGASKTKGKSKLNTITPVVGKKR

SEQ ID NO: 573 - protein, 29 aa, Artificial Sequence
  chemically synthesized
KKRKKGEKQIPGEEKGRKRRRVKEDKKKR

SEQ ID NO: 574 - protein, 32 aa, Artificial Sequence
  chemically synthesized
KKREAEEKEKRVRIAKELAERERLERQQKKKR

SEQ ID NO: 575 - protein, 31 aa, Artificial Sequence
  chemically synthesized
KKRAATTVLQELKKLPPLPVVEKPKLFFKKR

SEQ ID NO: 576 - protein, 34 aa, Artificial Sequence
  chemically synthesized
KKRGLTGDSKKATKESGLISTKKRKMVEMLEKKR

SEQ ID NO: 577 - protein, 27 aa, Artificial Sequence
  chemically synthesized
KKRKREKKELKLENHQENSRNQKPKKR

SEQ ID NO: 578 - protein, 44 aa, Artificial Sequence
  chemically synthesized
KKRSYKDFLREEEEIAAQVRNSSKKKLKDSELYFLGTDTHKKKR

SEQ ID NO: 579 - protein, 34 aa, Artificial Sequence
  chemically synthesized
KKRQLLDSDEEQEEDEGRNRAPELGAPGIQKKKR

SEQ ID NO: 580 - protein, 38 aa, Artificial Sequence
  chemically synthesized
KKRGKKKHIKEEPLSEEEPCTSTAIASPEKKKKKKKKR

SEQ ID NO: 581 - protein, 39 aa, Artificial Sequence
  chemically synthesized
KKRGRPKKQPLLTVETIHEGTSTSPVSPISREFPGTKKR

SEQ ID NO: 582 - protein, 40 aa, Artificial Sequence
  chemically synthesized
KKRKGKVKKTKKKKTSNKKEKTKKSKSKNKKDAKKKAKKR

SEQ ID NO: 583 - protein, 41 aa, Artificial Sequence
  chemically synthesized
KKRKFTKEDAIYGVFNDGWGDYEDEEESKMTEEEYYKMKKR

SEQ ID NO: 584 - protein, 32 aa, Artificial Sequence
  chemically synthesized
KKRKRATTTEEPQGSRNELVALENIEGIYKKR

SEQ ID NO: 585 - protein, 38 aa, Artificial Sequence
  chemically synthesized
KKRGPKKKKYKPEAAEVEKKNEEGDTVKENPIAEAKKR

SEQ ID NO: 586 - protein, 40 aa, Artificial Sequence
  chemically synthesized
KKRINEVSTTEGAPAEKKKKVEKWLNTSSEDGEGTKKKKR

SEQ ID NO: 587 - protein, 32 aa, Artificial Sequence
  chemically synthesized
KKRNFDEIDRSSMPFPYATKRFYHLSSFDKKR

SEQ ID NO: 588 - protein, 46 aa, Artificial Sequence
  chemically synthesized
KKRKNIKLFLNIINSNEYINVNKIFHGKCIYELPFYVNKERIKKKR

SEQ ID NO: 589 - protein, 26 aa, Artificial Sequence
  chemically synthesized
KKRKAMVEELIKRGYAPDPIADWKKR

SEQ ID NO: 590 - protein, 44 aa, Artificial Sequence
  chemically synthesized
KKRRGRKPKKKDDPKMELKDEVKDLKDFVVEESTSASSSAPKKR

SEQ ID NO: 591 - protein, 32 aa, Artificial Sequence
  chemically synthesized
KKRLEKENRKIKEEDDEDSDDEDDEKAKKKKR

SEQ ID NO: 592 - protein, 44 aa, Artificial Sequence
  chemically synthesized
KKRKRGPKKKKFKPEVAGKAAETENDDVAAAPEEADPIAEAKKR

SEQ ID NO: 593 - protein, 46 aa, Artificial Sequence
  chemically synthesized
KKRKITDEKDAQHVPAEKREKVENWLKKSTEKPTSSQSDAEKKKKR

SEQ ID NO: 594 - protein, 29 aa, Artificial Sequence
  chemically synthesized
KKRDDNKDKEGSSMDKLREESRRQYLKKR

SEQ ID NO: 595 - protein, 35 aa, Artificial Sequence
  chemically synthesized
KKRVTSKSRTKRVKMFKQCQWVDADNQRDIKRKKR

SEQ ID NO: 596 - protein, 38 aa, Artificial Sequence
  chemically synthesized
KKRMTEKDISSSESSISESKSLNCSASNQNENEKRKKR

SEQ ID NO: 597 - protein, 35 aa, Artificial Sequence; identical to SEQ ID NO: 595
  chemically synthesized

SEQ ID NO: 598 - protein, 38 aa, Artificial Sequence; identical to SEQ ID NO: 596
  chemically synthesized

SEQ ID NO: 599 - protein, 35 aa, Artificial Sequence; identical to SEQ ID NO: 595
  chemically synthesized

SEQ ID NO: 600 - protein, 38 aa, Artificial Sequence; identical to SEQ ID NO: 596
  chemically synthesized

SEQ ID NO: 601 - protein, 35 aa, Artificial Sequence; identical to SEQ ID NO: 595
  chemically synthesized

SEQ ID NO: 602 - protein, 38 aa, Artificial Sequence; identical to SEQ ID NO: 596
  chemically synthesized

SEQ ID NO: 603 - protein, 34 aa, Artificial Sequence
  chemically synthesized
KKRGRPKKPKDENESDYNNTSFSDSNTDGTPKKR

SEQ ID NO: 604 - protein, 30 aa, Artificial Sequence
  chemically synthesized
KKRGRPSKASVGGKSSTAAVAAISPGIKKR

SEQ ID NO: 605 - protein, 32 aa, Artificial Sequence
  chemically synthesized
KKRANRKKANNNKKRASNNRKKANNNNNNKKR

SEQ ID NO: 606 - protein, 41 aa, Artificial Sequence
  chemically synthesized
KKRDWYIQPTCARSGDGLYQGLDWLSDYIFDKKNKKKGKKR

SEQ ID NO: 607 - protein, 35 aa, Artificial Sequence
  chemically synthesized
KKRHLEDSLDMLNEEIVKLRAAEEIRLTDQEDKKR

SEQ ID NO: 608 - protein, 35 aa, Artificial Sequence
  chemically synthesized
KKRNNVFLTITDVIGRVVVSQSAGSCKITTKKKKR

SEQ ID NO: 609 - protein, 44 aa, Artificial Sequence
  chemically synthesized
KKRYYLFFSKKRNNVFLTITDVIGRVVVSQSAGSCKITTKKKKR

SEQ ID NO: 610 - protein, 37 aa, Artificial Sequence
  chemically synthesized
KKREIEIQQQLELQEETTLEIRERNVSLEQEVELKKR

SEQ ID NO: 611 - protein, 43 aa, Artificial Sequence
  chemically synthesized
KKRWFILKGGDLSYYKTKGELVPLGVIHLNTSGHIKNSDRKKR

SEQ ID NO: 612 - protein, 45 aa, Artificial Sequence
  chemically synthesized
KKRPNRLIIDQSDNDDNSMVMLSQAKMDELGLFRGDSVILKGKKR

SEQ ID NO: 613 - protein, 31 aa, Artificial Sequence
  chemically synthesized
KKRKGKGKKRGKGRRRGSKGRKKKKGKGKKR

SEQ ID NO: 614 - protein, 35 aa, Artificial Sequence
  chemically synthesized
KKRARSPSKKARRRSRSTKKTAAKRRKRSSSPKKR

SEQ ID NO: 615 - protein, 26 aa, Artificial Sequence
  chemically synthesized
KKREAEKKKCAKLAKKEKEAAEKKKR

SEQ ID NO: 616 - protein, 27 aa, Artificial Sequence
  chemically synthesized
KKRCKDLAKNKKKGHKKKGRNENRKKR

SEQ ID NO: 617 - protein, 35 aa, Artificial Sequence
  chemically synthesized
KKRKEAAEKKKCEKAAKKRKEAAEKKKCEKSAKKR

SEQ ID NO: 618 - protein, 35 aa, Artificial Sequence
  chemically synthesized
KKRKEEAEKKKCEKTAKKRKEAAEKKKCEKAAKKR

SEQ ID NO: 619 - protein, 35 aa, Artificial Sequence
  chemically synthesized
KKRKEAAEKKKCEKAAKKRKEEAEKKKCEKTAKKR

SEQ ID NO: 620 - protein, 35 aa, Artificial Sequence
  chemically synthesized
KKRKEEAEKKKCEKTAKKRKETAEKKKCEKAAKKR

SEQ ID NO: 621 - protein, 35 aa, Artificial Sequence
  chemically synthesized
KKRKETAEKKKCEKAAKKRKQAAEKKKCEKAAKKR

SEQ ID NO: 622 - protein, 29 aa, Artificial Sequence
  chemically synthesized
KKRGSKTSELKQNETTDAVVVNNEKVKKR

SEQ ID NO: 623 - protein, 26 aa, Artificial Sequence
  chemically synthesized
KKRKSAIDVLKMPLFDILRSSPPKKR

SEQ ID NO: 624 - protein, 42 aa, Artificial Sequence
  chemically synthesized
KKRFNLNLEEARQAFQTFKPDWNKIRYDAMKMQTSLGQMKKR

SEQ ID NO: 625 - protein, 38 aa, Artificial Sequence
  chemically synthesized
KKRSDKRARSESKSRSRSGGRRSRSNSPPNRSPSPKKR

SEQ ID NO: 626 - protein, 34 aa, Artificial Sequence
  chemically synthesized
KKRGVVLKPSVDEETDRRRMLNRIAAVRYREKKR

SEQ ID NO: 627 - protein, 36 aa, Artificial Sequence
  chemically synthesized
KKRFHEMAEKDKQRYEAEMQNYVPPKGAVVGRGKKR

SEQ ID NO: 628 - protein, 36 aa, Artificial Sequence
  chemically synthesized
KKRQHSSRSNESVSSSTSTEKSHKKTKKTKMKEKKR

SEQ ID NO: 629 - protein, 37 aa, Artificial Sequence; identical to SEQ ID NO: 610
  chemically synthesized

SEQ ID NO: 630 - protein, 30 aa, Artificial Sequence
  chemically synthesized
KKRMDDFVSQVGEDRLATYKPFTEDPSKKR

SEQ ID NO: 631 - protein, 28 aa, Artificial Sequence
  chemically synthesized
KKRSKKRNSIDSGRKDKSKKRKSKKKKR

SEQ ID NO: 632 - protein, 31 aa, Artificial Sequence
  chemically synthesized
KKRDSKNRRSHSKSDENEEGEEDDEERRKKR

SEQ ID NO: 633 - protein, 42 aa, Artificial Sequence
  chemically synthesized
KKRLFEDFTNLYIEDDCLLSCSFSFFIYNKSIHLHFNVDKKR

SEQ ID NO: 634 - protein, 26 aa, Artificial Sequence
  chemically synthesized
KKRIPNATEEEIEILEGMLCWNPKKR

SEQ ID NO: 635 - protein, 46 aa, Artificial Sequence
  chemically synthesized
KKRKKDRDHNNNNNNNNNNNNNNNEQTSDSSDSSDSDSESRSKKKR

SEQ ID NO: 636 - protein, 26 aa, Artificial Sequence
  chemically synthesized
KKRAAEQKIIDDEKARLKSIENSKKR

SEQ ID NO: 637 - protein, 38 aa, Artificial Sequence
  chemically synthesized
KKRKCNFSSPLLFSPFKYGVTSPFSPSKMKLKSPFKKR

SEQ ID NO: 638 - protein, 36 aa, Artificial Sequence
  chemically synthesized
KKRLKREKRLKEKQDLLLIKLEKQKEKQLEEQMKKR

SEQ ID NO: 639 - protein, 27 aa, Artificial Sequence
  chemically synthesized
KKRIKFTHMVGRGQYGKVYDALYDKKR

SEQ ID NO: 640 - protein, 35 aa, Artificial Sequence
  chemically synthesized
KKRREKEARKMKRAGGRFKSRATGANAEEKRAKKR

SEQ ID NO: 641 - protein, 39 aa, Artificial Sequence
  chemically synthesized
KKRLQKEEQDRLAAAELERKRLEKEAEEKRIAQELEKKR

SEQ ID NO: 642 - protein, 31 aa, Artificial Sequence
  chemically synthesized
KKRKITSSEYGMSLEFFKKNPKKVVQNLKKR

SEQ ID NO: 643 - protein, 41 aa, Artificial Sequence
  chemically synthesized
KKRDLIKNNKLIHNVDVNYINMITNDNHISSEKCRDIKKKR

SEQ ID NO: 644 - protein, 46 aa, Artificial Sequence
  chemically synthesized
KKRIYGYLFYTTLLKNITSLNNLFVHYILNNYFFFHSKSMYMLKKR

SEQ ID NO: 645 - protein, 31 aa, Artificial Sequence
  chemically synthesized
KKRIFIYENTVYYTPDDCVFCTQLNCTIKKR

SEQ ID NO: 646 - protein, 44 aa, Artificial Sequence
  chemically synthesized
KKRRNEETRSARSVGIAAADARQAAIVAEKTSGPSLLEIHQKKR

SEQ ID NO: 647 - protein, 39 aa, Artificial Sequence
  chemically synthesized
KKRPGTTSKKSIATVTASPEMSSKTTQMEPEQDGEGKKR

SEQ ID NO: 648 - protein, 29 aa, Artificial Sequence
  chemically synthesized
KKRLARGGHVEDPTADPLDISLPSSKKKR

SEQ ID NO: 649 - protein, 27 aa, Artificial Sequence
  chemically synthesized
KKRSDESDDDNIGLVARGSPRFFGKKR

SEQ ID NO: 650 - protein, 45 aa, Artificial Sequence
  chemically synthesized
KKRADDEDILLGERGSPRFFGKKRANDENISFSLRGSPRFFGKKR

SEQ ID NO: 651 - protein, 46 aa, Artificial Sequence
  chemically synthesized
KKRSDDNVALDLRGSPRFFGKRQSSDLDDEISVALRGSPRFFGKKR

SEQ ID NO: 652 - protein, 34 aa, Artificial Sequence
  chemically synthesized
KKRTEDGRPTLSAHPARFSPEDKYSRQRLTIKKR

SEQ ID NO: 653 - protein, 32 aa, Artificial Sequence
  chemically synthesized
KKRRVEKKKSKTKWTERKQKVEHDKEKRQKKR

SEQ ID NO: 654 - protein, 37 aa, Artificial Sequence
  chemically synthesized
KKRPRQPRKRIVMVEEVKRKIRTPIKEEEEVQERKKR

SEQ ID NO: 655 - protein, 33 aa, Artificial Sequence
  chemically synthesized
KKRVQILYIESESEDEDEQDSHDKSLDSPEKKR

SEQ ID NO: 656 - protein, 34 aa, Artificial Sequence
  chemically synthesized
KKRKRGVVNTKAYKETKPAVKKETKATPALHKKR

SEQ ID NO: 657 - protein, 40 aa, Artificial Sequence
  chemically synthesized
KKRKCVITLDEKQVESKRLKKEESNVEATSRPPAQSPKKR

SEQ ID NO: 658 - protein, 37 aa, Artificial Sequence
  chemically synthesized
KKRKKPQTAAKSSSRSDSDSDWANNKAGAPSSKKKKR

SEQ ID NO: 659 - protein, 39 aa, Artificial Sequence
  chemically synthesized
KKRKRKEEGEKEKKPRKKVPKQLGVMALNSHKSEKKKKR

SEQ ID NO: 660 - protein, 33 aa, Artificial Sequence
  chemically synthesized
KKRKKVSGPNPLSCLKKKKKTQDTNSSASEKKR

SEQ ID NO: 661 - protein, 33 aa, Artificial Sequence; identical to SEQ ID NO: 543
  chemically synthesized

SEQ ID NO: 662 - protein, 40 aa, Artificial Sequence
  chemically synthesized
KKRLEDEQEMVRMVRAATLIQALWKGYLVRSMLKSKKKKR

SEQ ID NO: 663 - protein, 32 aa, Artificial Sequence
  chemically synthesized
KKRSREDVGDNDDTEGAIGVRNKVAGGKMKKR

SEQ ID NO: 664 - protein, 39 aa, Artificial Sequence
  chemically synthesized
KKREEMEEENRKIIEFAKLQQQREEDRMAKVQEKVKKKR

SEQ ID NO: 665 - protein, 31 aa, Artificial Sequence
  chemically synthesized
KKRRQYQEEEVLDGPGVNTAQKAKKKKQKKR

SEQ ID NO: 666 - protein, 37 aa, Artificial Sequence
  chemically synthesized
KKRKQKEEEEPTTTERSAEKYSEHTDESIRKSKKKKR

SEQ ID NO: 667 - protein, 41 aa, Artificial Sequence
  chemically synthesized
KKREGSSAQAPASKKPKEEIPVIPKGKPKSGRVWKDRSKKR

SEQ ID NO: 668 - protein, 26 aa, Artificial Sequence
  chemically synthesized
KKRKLDPEIVPEEKDCGDDEGNSKKR

SEQ ID NO: 669 - protein, 39 aa, Artificial Sequence
  chemically synthesized
KKRMEAEQEMVRMVRAATLIQAFWKGYLVRSLLRSKKKR

SEQ ID NO: 670 - protein, 45 aa, Artificial Sequence
  chemically synthesized
KKRSTSVMSFFSKVSWNLRLQKQEPLKNVFFILAETARDPSVKKR

SEQ ID NO: 671 - protein, 41 aa, Artificial Sequence
  chemically synthesized
KKRHKKEKRKKEKDRGRRLDSSLAPAPIQHDSDSSTCCKKR

SEQ ID NO: 672 - protein, 40 aa, Artificial Sequence
  chemically synthesized
KKRIERFYHCLQHALEKETVSTTSQPKEKVNTSYIRKKKR

SEQ ID NO: 673 - protein, 33 aa, Artificial Sequence; identical to SEQ ID NO: 543
  chemically synthesized

SEQ ID NO: 674 - protein, 27 aa, Artificial Sequence
  chemically synthesized
KKRKERFGIVTSSAGTGTTEDTEAKKR

SEQ ID NO: 675 - protein, 29 aa, Artificial Sequence
  chemically synthesized
KKRKKGEKQIPGEEKGRKRRRVKEDKKKR

SEQ ID NO: 676 - protein, 42 aa, Artificial Sequence
  chemically synthesized
KKRKGSSSLAPASKKLNKEELPVIPKGKPKSGRVWKDRSKKR

SEQ ID NO: 677 - protein, 45 aa, Artificial Sequence; identical to SEQ ID NO: 533
  chemically synthesized

SEQ ID NO: 678 - protein, 35 aa, Artificial Sequence
  chemically synthesized
KKRKDEGKSRTTPPERPLTEVKAETRAEEAPEKKR

SEQ ID NO: 679 - protein, 35 aa, Artificial Sequence
  chemically synthesized
KKRKEEGKSRTTPPERPLTEVKAETRAEEAPEKKR

SEQ ID NO: 680 - protein, 35 aa, Artificial Sequence; identical to SEQ ID NO: 538
  chemically synthesized

SEQ ID NO: 681 - protein, 35 aa, Artificial Sequence; identical to SEQ ID NO: 538
  chemically synthesized

SEQ ID NO: 682 - protein, 35 aa, Artificial Sequence; identical to SEQ ID NO: 565
  chemically synthesized

SEQ ID NO: 683 - protein, 43 aa, Artificial Sequence
  chemically synthesized
KKRKALEAKKEEEEIQREMVKLRREIIERRRTVKEAWKIEKKR

SEQ ID NO: 684 - protein, 41 aa, Artificial Sequence; identical to SEQ ID NO: 539
  chemically synthesized

SEQ ID NO: 685 - protein, 37 aa, Artificial Sequence
  chemically synthesized
KKRILESHNNTLVDPCEEHKKKNPDASVKFSEFLKKR

SEQ ID NO: 686 - protein, 34 aa, Artificial Sequence
  chemically synthesized
KKRLRMLAVLGVELVFMLAVILGVLLGAHTHKKR

SEQ ID NO: 687 - protein, 37 aa, Artificial Sequence
  chemically synthesized
KKRKRGDDDYALPGDGDLVVECEEEGEKGEKRVKKKR

SEQ ID NO: 688 - protein, 40 aa, Artificial Sequence
  chemically synthesized
KKRKKRKRGDDDYALPGDGDLVVECEEEGEKGEKRVKKKR

SEQ ID NO: 689 - protein, 43 aa, Artificial Sequence
  chemically synthesized
KKRKRGDDDYALPGDGDLVVECEEEGEKGEKRVKKKRRSRKKR

SEQ ID NO: 690 - protein, 46 aa, Artificial Sequence
  chemically synthesized
KKRKKRKRGDDDYALPGDGDLVVECEEEGEKGEKRVKKKRRSRKKR

SEQ ID NO: 691 - protein, 37 aa, Artificial Sequence; identical to SEQ ID NO: 687
  chemically synthesized

SEQ ID NO: 692 - protein, 40 aa, Artificial Sequence; identical to SEQ ID NO: 688
  chemically synthesized

SEQ ID NO: 693 - protein, 43 aa, Artificial Sequence; identical to SEQ ID NO: 689
  chemically synthesized

SEQ ID NO: 694 - protein, 46 aa, Artificial Sequence; identical to SEQ ID NO: 690
  chemically synthesized

SEQ ID NO: 695 - protein, 28 aa, Artificial Sequence
  chemically synthesized
KKRNPESALLNQEKNIEENYAESTIKKR

SEQ ID NO: 696 - protein, 28 aa, Artificial Sequence
  chemically synthesized
KKRNPESALSNQEKNIEKNYAESKIKKR

SEQ ID NO: 697 - protein, 45 aa, Artificial Sequence
  chemically synthesized
KKRDKGEKKDFCFLTVWGMETELPFGSAQKKPSFFEPISKELKKR

SEQ ID NO: 698 - protein, 28 aa, Artificial Sequence
  chemically synthesized
KKRNPESALLNQEKNIEENFAESMIKKR

SEQ ID NO: 699 - protein, 31 aa, Artificial Sequence
  chemically synthesized
KKRQDKKNPGSDAQNQKDVEEDSTRSDSKKR

SEQ ID NO: 700 - protein, 28 aa, Artificial Sequence
  chemically synthesized
KKRKKKDEGLDEDDYLLLQDNNVKFKKR

SEQ ID NO: 701 - protein, 27 aa, Artificial Sequence
  chemically synthesized
KKRKSLERYGSITSAVSDDKGDTTKKR

SEQ ID NO: 702 - protein, 39 aa, Artificial Sequence
  chemically synthesized
KKRHYGGESSLAGTQSSIIMRTAAEMLAVYQACGIKKKR

SEQ ID NO: 703 - protein, 36 aa, Artificial Sequence
  chemically synthesized
KKRGRNIDDAEEVENELKRVEDELYKIPDHLKVKKR

SEQ ID NO: 704 - protein, 27 aa, Artificial Sequence
  chemically synthesized
KKREEEAEQARKREEEREKEEEMAKKR

SEQ ID NO: 705 - protein, 32 aa, Artificial Sequence
  chemically synthesized
KKREEEEARKREEERKREEEEAKRREEERKKR

SEQ ID NO: 706 - protein, 44 aa, Artificial Sequence
  chemically synthesized
KKRRGRPRKYGPDSGEMSLGLNPGAPSFTVSQPSSGGDGGEKKR

SEQ ID NO: 707 - protein, 34 aa, Artificial Sequence
  chemically synthesized
KKRQDFVKDRRWIKREYDEFKVRINGLPEQIKKR

SEQ ID NO: 708 - protein, 44 aa, Artificial Sequence
  chemically synthesized
KKRKLETCDETWKREVVQAEEAKGGGEQKSESKKAKKQDKEKKR

SEQ ID NO: 709 - protein, 30 aa, Artificial Sequence
  chemically synthesized
KKRKPREWWKEEFCEELTRKKRKKKKKKKR

SEQ ID NO: 710 - protein, 37 aa, Artificial Sequence
  chemically synthesized
KKRGLSSISSIDSWFHRDDGASSVHDHNLNPTKRKKR

SEQ ID NO: 711 - protein, 45 aa, Artificial Sequence
  chemically synthesized
KKRKKKKKKKRGLSSISSIDSWFHRDDGASSVHDHNLNPTKRKKR

SEQ ID NO: 712 - protein, 27 aa, Artificial Sequence
  chemically synthesized
KKRRRATKKPYSRSIVGATLEVIQKKR

SEQ ID NO: 713 - protein, 37 aa, Artificial Sequence
  chemically synthesized
KKRVDSVVIGRSSKARRGHREPRKARSSGRLEAEKKR

SEQ ID NO: 714 - protein, 45 aa, Artificial Sequence
  chemically synthesized
KKRNKKFTISIKLFKKFYKNKLNENGEYKIESQILQNEKELNKKR

SEQ ID NO: 715 - protein, 39 aa, Artificial Sequence
  chemically synthesized
KKRIYLISDRNPSTGETGWYDKDKGRESKKGIWQIFKKR

SEQ ID NO: 716 - protein, 37 aa, Artificial Sequence
  chemically synthesized
KKRIAKAKSEAAEYQKLLASRLKEQREKRSESLAKKR

SEQ ID NO: 717 - protein, 27 aa, Artificial Sequence
  chemically synthesized
KKRRRTTKKPYSRSIVGATLEVIQKKR

SEQ ID NO: 718 - protein, 45 aa, Artificial Sequence
  chemically synthesized
KKRRAKVFKLAKGFKGAHNSLFRTAKQQVLKALRYSYVGRKRKKR

SEQ ID NO: 719 - protein, 37 aa, Artificial Sequence
  chemically synthesized
KKRIAKANSDAADYQKLLASRLKEQRDRRSESLAKKR

SEQ ID NO: 720 - protein, 29 aa, Artificial Sequence
  chemically synthesized
KKRFLDEMNKKKSCLKMVAQFFFQFKKKR

SEQ ID NO: 721 - protein, 43 aa, Artificial Sequence
  chemically synthesized
KKRTNLKKGPQSKLTKKKKERKVDKTRAIINEIERVLKEKKKR

SEQ ID NO: 722 - protein, 46 aa, Artificial Sequence
  chemically synthesized
KKRFLDEMNKKKSCLKMVAQFFFQFKKKRKNKKIDKAIKGINKKKR

SEQ ID NO: 723 - protein, 32 aa, Artificial Sequence
  chemically synthesized
KKRNKMQDLTNRANKARNEIERIRKEKKKKKR

SEQ ID NO: 724 - protein, 34 aa, Artificial Sequence
  chemically synthesized
KKRASVRKICQKCRLTRRRGRIRVICSNPRHKKR

SEQ ID NO: 725 - protein, 29 aa, Artificial Sequence
  chemically synthesized
KKRRTLQEWQIQPKKYLLEKHNIKVLKKR

SEQ ID NO: 726 - protein, 45 aa, Artificial Sequence
  chemically synthesized
KKRRAKIFKLAKGFKGAHKCLFRTAKQQVLKALRYSYVGRKRKKR

SEQ ID NO: 727 - protein, 46 aa, Artificial Sequence
  chemically synthesized
KKRLTAAQVLEHTWILNAKKAPNVSLGETVKARLKQFSVMNKLKKR

SEQ ID NO: 728 - protein, 29 aa, Artificial Sequence
  chemically synthesized
KKRLTLKHRIEIVMGIICMIVAGFQEKKR

SEQ ID NO: 729 - protein, 28 aa, Artificial Sequence
  chemically synthesized
KKRIDNFKKEALLKANPQIQANPQLKKR

SEQ ID NO: 730 - protein, 46 aa, Artificial Sequence
  chemically synthesized
KKRLSAAQVLEHSWIQNAKKAPNVSLGETVKARLKQFSVMNKLKKR

SEQ ID NO: 731 - protein, 28 aa, Artificial Sequence
  chemically synthesized
KKRRGRPRKYEANGAPLPSSSVPLVKKR

SEQ ID NO: 732 - protein, 36 aa, Artificial Sequence
  chemically synthesized
KKRGYNGKVIALIVALSTVISIMLVLLFLFMMYKKR

SEQ ID NO: 733 - protein, 27 aa, Artificial Sequence
  chemically synthesized
KKRDASFVQPDERTAQTFSTKNKEKKR

SEQ ID NO: 734 - protein, 33 aa, Artificial Sequence
  chemically synthesized
KKRKLEAEAEVVVVEAAAATSTDEATKSSKKKR

SEQ ID NO: 735 - protein, 46 aa, Artificial Sequence
  chemically synthesized
KKRSRATSTDKNKRARVNKRAQKNVEMSGDNNEGEEEEGETKLKKR

SEQ ID NO: 736 - protein, 27 aa, Artificial Sequence
  chemically synthesized
KKRVSDESDSDSDSGDRKRRRRSMKKR

SEQ ID NO: 737 - protein, 45 aa, Artificial Sequence
  chemically synthesized
KKRKRSKPLRPAPSRVLRSTSEKKNKAHNELLNDGAGVQPAEKKR

SEQ ID NO: 738 - protein, 26 aa, Artificial Sequence
  chemically synthesized
KKRKRSSKKDKHRRSKQRDKRHEKKR

SEQ ID NO: 739 - protein, 44 aa, Artificial Sequence
  chemically synthesized
KKRSMRDKRPKRKSRRSPDSLEDSNSGSEASLSDVNVEIGAKKR

SEQ ID NO: 740 - protein, 41 aa, Artificial Sequence
  chemically synthesized
KKRKSKKNKRHKKHSSRTVEETDESSTGSEDSREKRGSKKR

SEQ ID NO: 741 - protein, 40 aa, Artificial Sequence
  chemically synthesized
KKREEQLEKARLAMERKRKLHEKAAAKAVIRVKKEAEKKR

SEQ ID NO: 742 - protein, 34 aa, Artificial Sequence
  chemically synthesized
KKRLRMLAVLGVELVFMLAVILGVLLSAHTHKKR

SEQ ID NO: 743 - protein, 44 aa, Artificial Sequence
  chemically synthesized
KKRKGSETEGWENLPDDLSCSTASRSSNFRSHFSLEGYARLKKR

SEQ ID NO: 744 - protein, 41 aa, Artificial Sequence
  chemically synthesized
KKRVYKDKSRCYECGDEGHLSYECPKNQLGPRERPPPPKKR

SEQ ID NO: 745 - protein, 29 aa, Artificial Sequence
  chemically synthesized
KKRMEALNLPKLSQILNSTSVKISPMKKR

SEQ ID NO: 746 - protein, 30 aa, Artificial Sequence
  chemically synthesized
KKRSIPRTPEKKMVDVKRVHIQRRGVGKKR

SEQ ID NO: 747 - protein, 26 aa, Artificial Sequence
  chemically synthesized
KKRVKTQCVIKSSDKSDHDTLLKKKR

SEQ ID NO: 748 - protein, 27 aa, Artificial Sequence
  chemically synthesized
KKRVYRLVKASDVKSKEHVKNKSGKKR

SEQ ID NO: 749 - protein, 27 aa, Artificial Sequence
  chemically synthesized
KKRPGVSPGDRSGGKGRPTSRMGNKKR

SEQ ID NO: 750 - protein, 36 aa, Artificial Sequence
  chemically synthesized
KKRNTCSVSSQTRKVSLKISKINGVGVRCTPNSKKR

SEQ ID NO: 751 - protein, 37 aa, Artificial Sequence
  chemically synthesized
KKRQDKLEMSEIKQFFDRPIMKAAKELNVGLTVLKKR

SEQ ID NO: 752 - protein, 43 aa, Artificial Sequence
  chemically synthesized
KKRNLKKKRQDKLEMSEIKQFFDRPIMKAAKELNVGLTVLKKR

SEQ ID NO: 753 - protein, 29 aa, Artificial Sequence
  chemically synthesized
KKRKLYDAMKISQSRKRSGVEIIEQRKKR

SEQ ID NO: 754 - protein, 36 aa, Artificial Sequence
  chemically synthesized
KKRGYNSQVLALIVALSGVTVILLALLFFFVMYKKR

SEQ ID NO: 755 - protein, 39 aa, Artificial Sequence
  chemically synthesized
KKRQPEFRMLGKDHLSDQESVEVRVPDSIKKPIDSSKKR

SEQ ID NO: 756 - protein, 37 aa, Artificial Sequence
  chemically synthesized
KKRVAKAKSEAAEYQKLLASRLKEQRDRRSESLAKKR

SEQ ID NO: 757 - protein, 29 aa, Artificial Sequence
  chemically synthesized
KKRKEETVLLPSGVQGLGMGLPDMRSKKR

SEQ ID NO: 758 - protein, 39 aa, Artificial Sequence
  chemically synthesized
KKRVKKLKSKKLEAEEELNNVQEIDAHDIVMEQKSDKKR

SEQ ID NO: 759 - protein, 38 aa, Artificial Sequence
  chemically synthesized
KKRKKTPNGDPQRLGIDTLLPQCLRGAPAAARRKRKKR

SEQ ID NO: 760 - protein, 36 aa, Artificial Sequence
  chemically synthesized
KKRRAPPPPSPGLLGQDKVSEKASLSSQADLQKKKR

SEQ ID NO: 761 - protein, 39 aa, Artificial Sequence; identical to SEQ ID NO: 557
  chemically synthesized

SEQ ID NO: 762 - protein, 42 aa, Artificial Sequence
  chemically synthesized
KKRMRLEEENEGLRQRLIETELAKQVLQTELDRPREHSLKKR

SEQ ID NO: 763 - protein, 33 aa, Artificial Sequence
  chemically synthesized
KKRAKMGKLKDKFKTELESTSEILGFDVKTKKR

SEQ ID NO: 764 - protein, 45 aa, Artificial Sequence
  chemically synthesized
KKRKKLKSEGTTSEKKAASQQDAVTEGAMPAATGKDQPPSTGKKR

SEQ ID NO: 765 - protein, 33 aa, Artificial Sequence
  chemically synthesized
KKRKEEERKKKETDQKKEAAVSVQEESDLEKKR

SEQ ID NO: 766 - protein, 29 aa, Artificial Sequence
  chemically synthesized
KKRKKGEKQAPGEEKGRKRRRVKEDKKKR

SEQ ID NO: 767 - protein, 36 aa, Artificial Sequence
  chemically synthesized
KKRSFSGFGSPLDRLSAGSVEHRGKQRKAVDHSKKR

SEQ ID NO: 768 - protein, 36 aa, Artificial Sequence
  chemically synthesized
KKRSFSGFGSPLDRLSAGSVEHRGKQRRVVDHSKKR

SEQ ID NO: 769 - protein, 27 aa, Artificial Sequence
  chemically synthesized
KKRVGDSSALQTIHGKEMSKIARKKKR

SEQ ID NO: 770 - protein, 27 aa, Artificial Sequence
  chemically synthesized
KKRVGDSSALQTIHGKEMSKIARKKKR

SEQ ID NO: 771 - protein, 41 aa, Artificial Sequence; identical to SEQ ID NO: 539
  chemically synthesized

SEQ ID NO: 772 - protein, 39 aa, Artificial Sequence
  chemically synthesized
KKRDKVEASSLPEARAGKRERCSAEDEDCLPPRPKAKKR

SEQ ID NO: 773 - protein, 45 aa, Artificial Sequence
  chemically synthesized
KKRRKKSSGERLKEEKPKKSKTAAASKTKGKSKLNTITPVVGKKR

SEQ ID NO: 774 - protein, 39 aa, Artificial Sequence
  chemically synthesized
KKRKQKEGEEAATTEKSLGDELLGHTDRSFRDSRKKKKR

SEQ ID NO: 775 - protein, 44 aa, Artificial Sequence
  chemically synthesized
KKRQKAERQGTAIGSEEEEAAGESGPRELSTEQSDQPSRKKKKR

SEQ ID NO: 776 - protein, 46 aa, Artificial Sequence
  chemically synthesized
KKRRKQRHEEDGEMGVCDEGGRDVTSRPKAVNSGGDKDPRRSSKKR

SEQ ID NO: 777 - protein, 33 aa, Artificial Sequence
  chemically synthesized
KKRTKMGKLKDKFKTELESTSEIIGFDVKTKKR

SEQ ID NO: 778 - protein, 45 aa, Artificial Sequence
  chemically synthesized
KKREQTASAPATPLVSKHRPSFTRSNTISKPYISNTLPSDAPKKR

SEQ ID NO: 779 - protein, 27 aa, Artificial Sequence
  chemically synthesized
KKRKERFGIVTSSAGTGTTEDTEAKKR

SEQ ID NO: 780 - protein, 42 aa, Artificial Sequence
  chemically synthesized
KKRPKGYVQTRTGRTSLKNSSETVGQKRKKAEETKGLPPKKR

SEQ ID NO: 781 - protein, 33 aa, Artificial Sequence
  chemically synthesized
KKRQRLIDVQDELIRLEPQLKQLQTKYDDLKKR

SEQ ID NO: 782 - protein, 45 aa, Artificial Sequence
  chemically synthesized
KKRKMYEDKPLSSESLSESDCGEVQAKKKKSGEERERTTDKAKKR

SEQ ID NO: 783 - protein, 31 aa, Artificial Sequence
  chemically synthesized
KKRVKQFKNKPQGGKGPKDKFQKANKFNKKR

SEQ ID NO: 784 - protein, 36 aa, Artificial Sequence
  chemically synthesized
KKRQTCEEDLDTQDEEDKDDLTKKERKVRKKDKKKR

SEQ ID NO: 785 - protein, 44 aa, Artificial Sequence
  chemically synthesized
KKRQQYCEEVLDVSNKDDGRTWEAEDGGERSQPHPKARAKKKKR

SEQ ID NO: 786 - protein, 46 aa, Artificial Sequence
  chemically synthesized
KKRRRRHHEEEEEMGVCDEGGRDVTGGPKAVNSGADTDPWRSSKKR

SEQ ID NO: 787 - protein, 46 aa, Artificial Sequence
  chemically synthesized
KKRSSIWQFFSRLFSSSSNATKKPEPPVNLKYNAPTSHVTPSVKKR

SEQ ID NO: 788 - protein, 36 aa, Artificial Sequence
  chemically synthesized
KKRRAPPPPSPKLLGQDKVSEKASLSSQADLQKKKR

SEQ ID NO: 789 - protein, 32 aa, Artificial Sequence
  chemically synthesized
KKRKALEFVTNPDIAAKKKLKKHKNKSEAKKR

SEQ ID NO: 790 - protein, 39 aa, Artificial Sequence
  chemically synthesized
KKRDKVETGGLPESKAGKRERSSAEDEDCLPPRPKLKKR

SEQ ID NO: 791 - protein, 41 aa, Artificial Sequence
  chemically synthesized
KKRVIASPQAPASKKLKEELPVIPKGKPKSGRVWKDRSKKR

SEQ ID NO: 792 - protein, 40 aa, Artificial Sequence
  chemically synthesized
KKRVEAEREMVRMVRAATLIQAMWKGYLVRSMLRSRKKKR

SEQ ID NO: 793 - protein, 27 aa, Artificial Sequence
  chemically synthesized
KKRSLKLTEGKSLVDGNGEKPVMKKKR

SEQ ID NO: 794 - protein, 28 aa, Artificial Sequence
  chemically synthesized
KKRRRRPPKGEEGSEEEETENGPKPKKR

SEQ ID NO: 795 - protein, 37 aa, Artificial Sequence
  chemically synthesized
KKRGGGGGRRSKKGGEFDEFVNDDTDDDLPVSKKKKR

SEQ ID NO: 796 - protein, 28 aa, Artificial Sequence
  chemically synthesized
KKRRREPQTPAQETLESEWPQKAKKKKR

SEQ ID NO: 797 - protein, 33 aa, Artificial Sequence; identical to SEQ ID NO: 765
  chemically synthesized

SEQ ID NO: 798 - protein, 36 aa, Artificial Sequence
  chemically synthesized
KKRSAGIIEDVGGEVQNMLEKFGADINKALLAKKKR

SEQ ID NO: 799 - protein, 45 aa, Artificial Sequence; identical to SEQ ID NO: 532
  chemically synthesized

SEQ ID NO: 800 - protein, 31 aa, Artificial Sequence
  chemically synthesized
KKRAATTVLQELKKLPPLPVIEKPKLFFKKR

SEQ ID NO: 801 - protein, 29 aa, Artificial Sequence
  chemically synthesized
KKRKKGQEAGHEAGGEDAAEANGAPEKKR

SEQ ID NO: 802 - protein, 45 aa, Artificial Sequence; identical to SEQ ID NO: 532
  chemically synthesized

SEQ ID NO: 803 - protein, 34 aa, Artificial Sequence
  chemically synthesized
KKRKRYFMQEEMEAKTMEPVAELPVPSATSSKKR

SEQ ID NO: 804 - protein, 37 aa, Artificial Sequence
  chemically synthesized
KKRKKSKGTETSQVEHTEPVAQTEPPEGTFLFPTKKR

SEQ ID NO: 805 - protein, 43 aa, Artificial Sequence
  chemically synthesized
KKRKRQKEADGTEEVDGIVADSQPQVIVEAQEETILLSPTKKR

SEQ ID NO: 806 - protein, 31 aa, Artificial Sequence
  chemically synthesized
KKRHQEDQDPIFQASDSSGYQSDHNKKKKKR

SEQ ID NO: 807 - protein, 45 aa, Artificial Sequence
  chemically synthesized
KKRHQEDQDPIFQASDSSGYQSDHNKKKKKRKHSEEANFESPKKR

SEQ ID NO: 808 - protein, 45 aa, Artificial Sequence
  chemically synthesized
KKRRTPLLSFLSKVSWKLRLQKRELLKNALFVLAERARDPNAKKR

SEQ ID NO: 809 - protein, 46 aa, Artificial Sequence
  chemically synthesized
KKRKKLKSEGTTPEKNAASQQDAVTEGAMPAATGKDQPPSTGKKKR

SEQ ID NO: 810 - protein, 39 aa, Artificial Sequence; identical to SEQ ID NO: 557
  chemically synthesized

SEQ ID NO: 811 - protein, 26 aa, Artificial Sequence
  chemically synthesized
KKRLRNKRSRSRESSSRPRARKDKKR

SEQ ID NO: 812 - protein, 31 aa, Artificial Sequence
  chemically synthesized
KKRREKAIGEGRVVYIRNLSGDMSSRELKKR

SEQ ID NO: 813 - protein, 35 aa, Artificial Sequence
  chemically synthesized
KKRRRSPSYSPSPVKKKKKKSSKKHKRHRSFSKKR

SEQ ID NO: 814 - protein, 31 aa, Artificial Sequence; identical to SEQ ID NO: 575
  chemically synthesized

SEQ ID NO: 815 - protein, 31 aa, Artificial Sequence
  chemically synthesized
KKRGRTPKILIPHPTSTPSKSAEPLKFPKKR

SEQ ID NO: 816 - protein, 46 aa, Artificial Sequence
  chemically synthesized
KKRLDGIEEVEREINRGRSCKGSEFTCPEDNKIRELTLEIERLKKR

SEQ ID NO: 817 - protein, 38 aa, Artificial Sequence
  chemically synthesized
KKRFGGVQELLSQQKKSGEVAVLKRDGRYIYYLITKKR

SEQ ID NO: 818 - protein, 37 aa, Artificial Sequence
  chemically synthesized
KKRLRRMTPFWRGVSLRPIGASCRDDSECITRLCKKR

SEQ ID NO: 819 - protein, 46 aa, Artificial Sequence
  chemically synthesized
KKRLDGIEEVEREINRGRLCKGSEFTCPEDNKIRELTLEIERLKKR

SEQ ID NO: 820 - protein, 45 aa, Artificial Sequence
  chemically synthesized
KKRKMYEDKPLSSESLSESDCGEVQAKRKKSGEERERTTDKAKKR

SEQ ID NO: 821 - protein, 32 aa, Artificial Sequence
  chemically synthesized
KKRKREDAGDDDDKEGAIGVRNKVAGGKMKKR

SEQ ID NO: 822 - protein, 45 aa, Artificial Sequence
  chemically synthesized
KKRDRAELQPGGPSEDECSDASVEAAEDCVQTPDIQDDVPKPKKR

SEQ ID NO: 823 - protein, 27 aa, Artificial Sequence
  chemically synthesized
KKRKERFGIVTSSAGTGTTEDTEAKKR

SEQ ID NO: 824 - protein, 40 aa, Artificial Sequence
  chemically synthesized
KKRVEAEREMVRMVRAATLIQAVWKGYLVRSILRSKKKKR

SEQ ID NO: 825 - protein, 35 aa, Artificial Sequence
  chemically synthesized
KKRKLKADDTDNVYYNANRKNSKRLNVEVFIPKKR

SEQ ID NO: 826 - protein, 45 aa, Artificial Sequence; identical to SEQ ID NO: 773
  chemically synthesized

SEQ ID NO: 827 - protein, 39 aa, Artificial Sequence
  chemically synthesized
KKRKNISQDTFGTTFGRIHMQKQDLSKLQTRKMKGLKKR

SEQ ID NO: 828 - protein, 43 aa, Artificial Sequence
  chemically synthesized
KKRVIASPQAPASKKLKEKEELPVIPKGKPKSGRVWKDRSKKR

SEQ ID NO: 829 - protein, 37 aa, Artificial Sequence
  chemically synthesized
KKRQRSESHSASERSSSAESERSYKKSKKHKKKSKKR

SEQ ID NO: 830 - protein, 32 aa, Artificial Sequence
  chemically synthesized
KKRQLLDSDEEEDDEGRRQAVSGTPRVHRKKR

SEQ ID NO: 831 - protein, 39 aa, Artificial Sequence; identical to SEQ ID NO: 581
  chemically synthesized

SEQ ID NO: 832 - protein, 32 aa, Artificial Sequence
  chemically synthesized
KKREAAEKEKRARIAKERAEKERLERQQEKKR

SEQ ID NO: 833 - protein, 41 aa, Artificial Sequence
  chemically synthesized
KKRGRKPGSVVAAAAAEAKKKAVKESSIRSVHETVLPIKKR

SEQ ID NO: 834 - protein, 46 aa, Artificial Sequence
  chemically synthesized
KKRKRCGVCVPCLRKEPCGACYNCVNRSTSHQICKMRKCEQLKKKR

SEQ ID NO: 835 - protein, 46 aa, Artificial Sequence; identical to SEQ ID NO: 834
  chemically synthesized

SEQ ID NO: 836 - protein, 31 aa, Artificial Sequence
  chemically synthesized
KKRKRSSTRKASDETDSESETDSRESFKKKR

SEQ ID NO: 837 - protein, 34 aa, Artificial Sequence
  chemically synthesized
KKRKKKHPSKKERKGTIRDYECAETKQKKKHKKR

SEQ ID NO: 838 - protein, 26 aa, Artificial Sequence
  chemically synthesized
KKRRREHGQLWFPEGFIPKEPSKKKR

SEQ ID NO: 839 - protein, 32 aa, Artificial Sequence
  chemically synthesized
KKRMAAELYPVSDHATLQKSGAVMLSLPEKKR

SEQ ID NO: 840 - protein, 36 aa, Artificial Sequence
  chemically synthesized
KKRRAPAPPPAPTQTLPPTSQISLGSPSSHNLLKKR

SEQ ID NO: 841 - protein, 31 aa, Artificial Sequence
  chemically synthesized
KKRKHVKNEEDETNHEKTKQHLKEEKRRKKR

SEQ ID NO: 842 - protein, 46 aa, Artificial Sequence
  chemically synthesized
KKRSSLFSPRKSRKNGNAAAESGRETGKHKSLWKTVFSVYKKDKKR

SEQ ID NO: 843 - protein, 46 aa, Artificial Sequence
  chemically synthesized
KKRKRCGVCVPCLRKEPCGTCYNCVNRSTSHQICKMRKCEQLKKKR

SEQ ID NO: 844 - protein, 27 aa, Artificial Sequence
  chemically synthesized
KKRGLKPSGKRELAHPPSSEPPLPKKR

SEQ ID NO: 845 - protein, 33 aa, Artificial Sequence
  chemically synthesized
KKRKRHRSASRKGRHSGSSSRRKRKEDKKHKKR

SEQ ID NO: 846 - protein, 35 aa, Artificial Sequence
  chemically synthesized
KKRREERRKILEEEEQKKKQEEAERKIREEEEKKR

SEQ ID NO: 847 - protein, 35 aa, Artificial Sequence; identical to SEQ ID NO: 846
  chemically synthesized

SEQ ID NO: 848 - protein, 26 aa, Artificial Sequence
  chemically synthesized
KKRRREHGQLWFPDGFIPKEPSKKKR

SEQ ID NO: 849 - protein, 27 aa, Artificial Sequence
  chemically synthesized
KKRRRRDEDSDTEGEQQTQPDGEAKKR

SEQ ID NO: 850 - protein, 31 aa, Artificial Sequence
  chemically synthesized
KKRRRRDEDSDTEGEQQTQPDGEAKKRRKKR

SEQ ID NO: 851 - protein, 34 aa, Artificial Sequence
  chemically synthesized
KKRECAANGVDYERAKLLEISAEDAERWERKKKR

SEQ ID NO: 852 - protein, 39 aa, Artificial Sequence
  chemically synthesized
KKRDEERKRELEERRKKEQEEQLRRLREEEREEDEKKKR

SEQ ID NO: 853 - protein, 41 aa, Artificial Sequence
  chemically synthesized
KKRSSSRCRSGSDSPARKHSTLAKYRAEVPDRRKKERRKKR

SEQ ID NO: 854 - protein, 26 aa, Artificial Sequence
  chemically synthesized
KKRRKRPQKAAGSDDDEEQTPQSKKR

SEQ ID NO: 855 - protein, 30 aa, Artificial Sequence
  chemically synthesized
KKRKKGGSSSGEQGEGGDEGEGGEKKKKKR

SEQ ID NO: 856 - protein, 26 aa, Artificial Sequence
  chemically synthesized
KKRSYKDLLREEEEIAEQVRKSSKKR

SEQ ID NO: 857 - protein, 45 aa, Artificial Sequence
  chemically synthesized
KKRKVEKQIPDATKKKKATVKKECFITQERSEEKPDNESNKNKKR

SEQ ID NO: 858 - protein, 27 aa, Artificial Sequence
  chemically synthesized
KKRHDSPDLSPQEQQTTPDLSLQRKKR

SEQ ID NO: 859 - protein, 30 aa, Artificial Sequence
  chemically synthesized
KKRKFEKPPDPSVRKRLKLVKEEKLLRKKR

SEQ ID NO: 860 - protein, 27 aa, Artificial Sequence
  chemically synthesized
KKRRKRPQKGGDGSDDDEDQAPQPKKR

SEQ ID NO: 861 - protein, 32 aa, Artificial Sequence
  chemically synthesized
KKRRKRPQKGGDGSDDDEDQAPQPKKRQPKKR

SEQ ID NO: 862 - protein, 33 aa, Artificial Sequence
  chemically synthesized
KKRKKGGGSSGSGGEQGEGGEEGEGGEKKKKKR

SEQ ID NO: 863 - protein, 34 aa, Artificial Sequence
  chemically synthesized
KKRPEVLTIHENSRQENYETETVQVKQAKPNKKR

SEQ ID NO: 864 - protein, 39 aa, Artificial Sequence
  chemically synthesized
KKRKHKLQETKGKIKKSESVQNTDPTEEADSSVKKKKKR

SEQ ID NO: 865 - protein, 44 aa, Artificial Sequence
  chemically synthesized
KKRKNRKKPTILEGKETETPVEKTPEGASGEGKKNKNKKKNKKR

SEQ ID NO: 866 - protein, 39 aa, Artificial Sequence
  chemically synthesized
KKRKKNFMMMRHSQNVRTKGKRSFREKQIALRDSLLKKR

SEQ ID NO: 867 - protein, 31 aa, Artificial Sequence
  chemically synthesized
KKRRARSRSNSRSKHRHRSRSRSKSREKKKR

SEQ ID NO: 868 - protein, 42 aa, Artificial Sequence
  chemically synthesized
KKRRKTCKTSTTDSRSSRLEEDPVGQDIPDESNAQSSPKKKR

SEQ ID NO: 869 - protein, 39 aa, Artificial Sequence
  chemically synthesized
KKRDEERRRELEERRKKEQEEQLRRLREEEREEEERKKR

SEQ ID NO: 870 - protein, 26 aa, Artificial Sequence
  chemically synthesized
KKRSYKDLLREEEEIAEQVRKSSKKR

SEQ ID NO: 871 - protein, 34 aa, Artificial Sequence
  chemically synthesized
KKREREQSETASTAPVEPFTLPKPVEVVVEEKKR

SEQ ID NO: 872 - protein, 31 aa, Artificial Sequence
  chemically synthesized
KKRAALSILQELKKLPVLPVVEKPKVHYKKR

SEQ ID NO: 873 - protein, 26 aa, Artificial Sequence
  chemically synthesized
KKRRRREGESDTEEEQTQPDGEGKKR

SEQ ID NO: 874 - protein, 30 aa, Artificial Sequence
  chemically synthesized
KKRRRREGESDTEEEQTQPDGEGKKRRKKR

SEQ ID NO: 875 - protein, 31 aa, Artificial Sequence
  chemically synthesized
KKRRPRSRSRSRSKHRHRSKSRSKSREKKKR

SEQ ID NO: 876 - protein, 34 aa, Artificial Sequence
  chemically synthesized
KKRECAANGVDFERAKLLEISAEDAERWERKKKR

SEQ ID NO: 877 - protein, 46 aa, Artificial Sequence
  chemically synthesized
KKRKELDDVSEDVETLEMVFESRDLDWEEQTANGDQEAQSNKRKKR

SEQ ID NO: 878 - protein, 30 aa, Artificial Sequence
  chemically synthesized
KKRAQRILIFLLEFLLDFCTGEDSVDGKKR

SEQ ID NO: 879 - protein, 41 aa, Artificial Sequence
  chemically synthesized
KKRAPKLRATCSSSGLDNLYNAVANIAKASSLRVEVIHKKR

SEQ ID NO: 880 - protein, 41 aa, Artificial Sequence; identical to SEQ ID NO: 879
  chemically synthesized

SEQ ID NO: 881 - protein, 45 aa, Artificial Sequence
  chemically synthesized
KKRRYFMDIWMKDSSGQEFFIEIKPKKETQPPVKPAHLTTAAKKR

SEQ ID NO: 882 - protein, 35 aa, Artificial Sequence
  chemically synthesized
KKREILIRSLQMIKRQAVKSAANQRNPMGGSWKKR

SEQ ID NO: 883 - protein, 37 aa, Artificial Sequence
  chemically synthesized
KKRPCKVKRKLFGSENIRPNKKIPLASDVDNELEKKR

SEQ ID NO: 884 - protein, 26 aa, Artificial Sequence
  chemically synthesized
KKRMDDTEKRKLQEDRRNEKQDLKKR

SEQ ID NO: 885 - protein, 28 aa, Artificial Sequence
  chemically synthesized
KKRYRSPSSDRSLSRDRSSSRDRSYKKR

SEQ ID NO: 886 - protein, 41 aa, Artificial Sequence
  chemically synthesized
KKRRPGRGDTSATSDGGTSPKRPLRDSWNLLPQRRAAHKKR

SEQ ID NO: 887 - protein, 26 aa, Artificial Sequence
  chemically synthesized
KKRVVGLESCSNVLKTRLMRFALKKR

SEQ ID NO: 888 - DNA, 3363 bp, Artificial Sequence
  Chemically Synthesized
atggactacaaagaccatgacggtgattataaagatcatgacatcgactacaaggatgacgatgacaagggcggaaactcaaagaaaaggtcactggaggacaacgaaacggaaatcaaagtctccagagacacctggaacactaagaacatgcggtccctggaaccgccacgaagcaagaaacggatacatggaggccccgggggaatcgattacaaggatgacgatgacaagatggcccccaagaagaagaggaaggtgggcattcaccgcggggtacctatggtggacttgaggacactcggttattcgcaacagcaacaggagaaaatcaagcctaaggtcaggagcaccgtcgcgcaacaccacgaggcgcttgtggggcatggcttcactcatgcgcatattgtcgcgctttcacagcaccctgcggcgcttgggacggtggctgtcaaataccaagatatgattgcggccctgcccgaagccacgcacgaggcaattgtaggggtcggtaaacagtggtcgggagcgcgagcacttgaggcgctgctgactgtggcgggtgagcttagggggcctccgctccagctcgacaccgggcagctgctgaagatcgcgaagagagggggagtaacagcggtagaggcagtgcacgcctggcgcaatgcgctcaccggggcccccttgaacctgaccccagaccaggtagtcgcaatcgcgaacaataatgggggaaagcaagccctggaaaccgtgcaaaggttgttgccggtcctttgtcaagaccacggccttacaccggagcaagtcgtggccattgcaagcaacatcggtggcaaacaggctcttgagacggttcagagacttctcccagttctctgtcaagcccacgggctgactcccgatcaagttgtagcgattgcgtcgaacattggagggaaacaagcattggagactgtccaacggctccttcccgtgttgtgtcaagcccacggtttgacgcctgcacaagtggtcgccatcgccaacaacaacggcggtaagcaggcgctggaaacagtacagcgcctgctgcctgtactgtgccaggatcatggactgaccccagaccaggtagtcgcaatcgcgtcaaacggagggggaaagcaagccctggaaaccgtgcaaaggttgttgccggtcctttgtcaagaccacggccttacaccggagcaagtcgtggccattgcaagcaatgggggtggcaaacaggctcttgagacggttcagagacttctcccagttctctgtcaagcccacgggctgactcccgatcaagttgtagcgattgcgtcgcatgacggagggaaacaagcattggagactgtccaacggctccttcccgtgttgtgtcaagcccacggtttgacgcctgcacaagtggtcgccatcgcctccaatattggcggtaagcaggcgctggaaacagtacagcgcctgctgcctgtactgtgccaggatcatggactgaccccagaccaggtagtcgcaatcgcgtcaaacggagggggaaagcaagccctggaaaccgtgcaaaggttgttgccggtcctttgtcaagaccacggccttacaccggagcaagtcgtggccattgcatcccacgacggtggcaaacaggctcttgagacggttcagagacttctcccagttctctgtcaagcccacgggctgactcccgatcaagttgtagcgattgcgtccaacggtggagggaaacaagcattggagactgtccaacggctccttcccgtgttgtgtcaagcccacggtttgacgcctgcacaagtggtcgccatcgccaacaacaacggcggtaagcaggcgctggaaacagtacagcgcctgctgcctgtactgtgccaggatcatggactgaccccagaccaggtagtcgcaatcgcgtcacatgacgggggaaagcaagccctggaaaccgtgcaaaggttgttgccggtcctttgtcaagaccacggccttacaccggagcaagtcgtggccattgcaagcaacatcggtggcaaacaggctcttgagacggttcagagacttctcccagttctctgtcaagcccacgggctgactcccgatcaagttgtagcgattgcgtcgcatgacggagggaaacaagcattggagactgtccaacggctccttcccgtgttgtgtcaagcccacggtttgacgcctgcacaagtggtcgccatcgccagccatgatggcggtaagcaggcgctggaaacagtacagcgcctgctgcctgtactgtgccaggatcatggactgaccccagaccaggtagtcgcaatcgcgtcgaacattgggggaaagcaagccctggaaaccgtgcaaaggttgttgccggtcctttgtcaagaccacggcctgacacccgaacaggtggtcgccattgcttcccacgacggaggacggccagccttggagtccatcgtagcccaattgtccaggcccgatcccgcgttggctgcgttaacgaatgaccatctggtggcgttggcatgtcttggtggacgacccgcgctcgatgcagtcaaaaagggtctgcctcatgctcccgcattgatcaaaagaaccaaccggcggattcccgagagaacttcccatcgagtcgcgggatccacgcgtttcttggacggtattgacaaagctcaggacgaacatgaaaagtaccactctaactggagagctatggcctccgattttaatcttccgccggtggtagcgaaagaaatcgttgccagttgcgacaaatgccaattgaagggagaagccatgcatggtcaagtggattgttcccccggaatatggcaactcgattgcacgcatctggaaggcaaggtcatcctcgtagcggtacatgttgcttctggatatattggcgccgaggttataccggcagaaacgggccaagaaacagcgtactttctcctgaaacttgcgggacgctggcctgtgaaaacgattcataccgacaacggttctaactttaccggagcaacagtacgggccgcatgctggtgggccggtataaagcaggaatttgggattccatacaatccgcaaagtcaaggtgtcgtcgagtctatgaataaggaactcaaaaagataattggtcaggttagagatcaagccgaacatctcaagacggcggtccaaatggcagtttttattcacaactttaagaggaaaggtgggattggtggctattcagcaggggagcgaatagtggacataatagcaaccgacatacagactaaggagttgcaaaagcagatcacaaagattcaaaatctcgagtaa

SEQ ID NO: 889 - DNA, 3465 bp, Artificial Sequence
  Chemically Synthesized
atggactacaaagaccatgacggtgattataaagatcatgacatcgactacaaggatgacgatgacaagggcggaaactcaaagaaaaggtcactggaggacaacgaaacggaaatcaaagtctccagagacacctggaacactaagaacatgcggtccctggaaccgccacgaagcaagaaacggatacatggaggccccgggggaatcgattacaaggatgacgatgacaagatggcccccaagaagaagaggaaggtgggcattcaccgcggggtacctatggtggacttgaggacactcggttattcgcaacagcaacaggagaaaatcaagcctaaggtcaggagcaccgtcgcgcaacaccacgaggcgcttgtggggcatggcttcactcatgcgcatattgtcgcgctttcacagcaccctgcggcgcttgggacggtggctgtcaaataccaagatatgattgcggccctgcccgaagccacgcacgaggcaattgtaggggtcggtaaacagtggtcgggagcgcgagcacttgaggcgctgctgactgtggcgggtgagcttagggggcctccgctccagctcgacaccgggcagctgctgaagatcgcgaagagagggggagtaacagcggtagaggcagtgcacgcctggcgcaatgcgctcaccggggcccccttgaacctgaccccagaccaggtagtcgcaatcgcgtcacatgacgggggaaagcaagccctggaaaccgtgcaaaggttgttgccggtcctttgtcaagaccacggccttacaccggagcaagtcgtggccattgcaagcaacatcggtggcaaacaggctcttgagacggttcagagacttctcccagttctctgtcaagcccacgggctgactcccgatcaagttgtagcgattgcgtcgcatgacggagggaaacaagcattggagactgtccaacggctccttcccgtgttgtgtcaagcccacggtttgacgcctgcacaagtggtcgccatcgccaacaacaacggcggtaagcaggcgctggaaacagtacagcgcctgctgcctgtactgtgccaggatcatggactgaccccagaccaggtagtcgcaatcgcgtcgaacattgggggaaagcaagccctggaaaccgtgcaaaggttgttgccggtcctttgtcaagaccacggccttacaccggagcaagtcgtggccattgcaaataataacggtggcaaacaggctcttgagacggttcagagacttctcccagttctctgtcaagcccacgggctgactcccgatcaagttgtagcgattgcgaataacaatggagggaaacaagcattggagactgtccaacggctccttcccgtgttgtgtcaagcccacggtttgacgcctgcacaagtggtcgccatcgccaacaacaacggcggtaagcaggcgctggaaacagtacagcgcctgctgcctgtactgtgccaggatcatggactgaccccagaccaggtagtcgcaatcgcgtcaaacggagggggaaagcaagccctggaaaccgtgcaaaggttgttgccggtcctttgtcaagaccacggccttacaccggagcaagtcgtggccattgcaaataataacggtggcaaacaggctcttgagacggttcagagacttctcccagttctctgtcaagcccacgggctgactcccgatcaagttgtagcgattgcgaataacaatggagggaaacaagcattggagactgtccaacggctccttcccgtgttgtgtcaagcccacggtttgacgcctgcacaagtggtcgccatcgccaacaacaacggcggtaagcaggcgctggaaacagtacagcgcctgctgcctgtactgtgccaggatcatggactgaccccagaccaggtagtcgcaatcgcgtcacatgacgggggaaagcaagccctggaaaccgtgcaaaggttgttgccggtcctttgtcaagaccacggccttacaccggagcaagtcgtggccattgcatcccacgacggtggcaaacaggctcttgagacggttcagagacttctcccagttctctgtcaagcccacgggctgactcccgatcaagttgtagcgattgcgtcgaacattggagggaaacaagcattggagactgtccaacggctccttcccgtgttgtgtcaagcccacggtttgacgcctgcacaagtggtcgccatcgccaacaacaacggcggtaagcaggcgctggaaacagtacagcgcctgctgcctgtactgtgccaggatcatggactgaccccagaccaggtagtcgcaatcgcgaacaataatgggggaaagcaagccctggaaaccgtgcaaaggttgttgccggtcctttgtcaagaccacggcctgaccccagaccaggtagtcgcaatcgcgaacaataatgggggaaagcaagccctggaaaccgtgcaaaggttgttgccggtcctttgtcaagaccacggcctgacacccgaacaggtggtcgccattgctaataataacggaggacggccagccttggagtccatcgtagcccaattgtccaggcccgatcccgcgttggctgcgttaacgaatgaccatctggtggcgttggcatgtcttggtggacgacccgcgctcgatgcagtcaaaaagggtctgcctcatgctcccgcattgatcaaaagaaccaaccggcggattcccgagagaacttcccatcgagtcgcgggatccacgcgtttcttggacggtattgacaaagctcaggacgaacatgaaaagtaccactctaactggagagctatggcctccgattttaatcttccgccggtggtagcgaaagaaatcgttgccagttgcgacaaatgccaattgaagggagaagccatgcatggtcaagtggattgttcccccggaatatggcaactcgattgcacgcatctggaaggcaaggtcatcctcgtagcggtacatgttgcttctggatatattggcgccgaggttataccggcagaaacgggccaagaaacagcgtactttctcctgaaacttgcgggacgctggcctgtgaaaacgattcataccgacaacggttctaactttaccggagcaacagtacgggccgcatgctggtgggccggtataaagcaggaatttgggattccatacaatccgcaaagtcaaggtgtcgtcgagtctatgaataaggaactcaaaaagataattggtcaggttagagatcaagccgaacatctcaagacggcggtccaaatggcagtttttattcacaactttaagaggaaaggtgggattggtggctattcagcaggggagcgaatagtggacataatagcaaccgacatacagactaaggagttgcaaaagcagatcacaaagattcaaaatctcgagtaa

SEQ ID NO: 890 - DNA, 3465 bp, Artificial Sequence
  Chemically Synthesized
atggactacaaagaccatgacggtgattataaagatcatgacatcgactacaaggatgacgatgacaagggcggaaactcaaagaaaaggtcactggaggacaacgaaacggaaatcaaagtctccagagacacctggaacactaagaacatgcggtccctggaaccgccacgaagcaagaaacggatacatggaggccccgggggaatcgattacaaggatgacgatgacaagatggcccccaagaagaagaggaaggtgggcattcaccgcggggtacctatggtggacttgaggacactcggttattcgcaacagcaacaggagaaaatcaagcctaaggtcaggagcaccgtcgcgcaacaccacgaggcgcttgtggggcatggcttcactcatgcgcatattgtcgcgctttcacagcaccctgcggcgcttgggacggtggctgtcaaataccaagatatgattgcggccctgcccgaagccacgcacgaggcaattgtaggggtcggtaaacagtggtcgggagcgcgagcacttgaggcgctgctgactgtggcgggtgagcttagggggcctccgctccagctcgacaccgggcagctgctgaagatcgcgaagagagggggagtaacagcggtagaggcagtgcacgcctggcgcaatgcgctcaccggggcccccttgaacctgaccccagaccaggtagtcgcaatcgcgtcgaacattgggggaaagcaagccctggaaaccgtgcaaaggttgttgccggtcctttgtcaagaccacggccttacaccggagcaagtcgtggccattgcaaataataacggtggcaaacaggctcttgagacggttcagagacttctcccagttctctgtcaagcccacgggctgactcccgatcaagttgtagcgattgcgaataacaatggagggaaacaagcattggagactgtccaacggctccttcccgtgttgtgtcaagcccacggtttgacgcctgcacaagtggtcgccatcgcctcgaatggcggcggtaagcaggcgctggaaacagtacagcgcctgctgcctgtactgtgccaggatcatggactgaccccagaccaggtagtcgcaatcgcgtcacatgacgggggaaagcaagccctggaaaccgtgcaaaggttgttgccggtcctttgtcaagaccacggccttacaccggagcaagtcgtggccattgcaagcaacatcggtggcaaacaggctcttgagacggttcagagacttctcccagttctctgtcaagcccacgggctgactcccgatcaagttgtagcgattgcgaataacaatggagggaaacaagcattggagactgtccaacggctccttcccgtgttgtgtcaagcccacggtttgacgcctgcacaagtggtcgccatcgccaacaacaacggcggtaagcaggcgctggaaacagtacagcgcctgctgcctgtactgtgccaggatcatggactgaccccagaccaggtagtcgcaatcgcgaacaataatgggggaaagcaagccctggaaaccgtgcaaaggttgttgccggtcctttgtcaagaccacggccttacaccggagcaagtcgtggccattgcaagcaatgggggtggcaaacaggctcttgagacggttcagagacttctcccagttctctgtcaagcccacgggctgactcccgatcaagttgtagcgattgcgaataacaatggagggaaacaagcattggagactgtccaacggctccttcccgtgttgtgtcaagcccacggtttgacgcctgcacaagtggtcgccatcgccaacaacaacggcggtaagcaggcgctggaaacagtacagcgcctgctgcctgtactgtgccaggatcatggactgaccccagaccaggtagtcgcaatcgcgtcaaacggagggggaaagcaagccctggaaaccgtgcaaaggttgttgccggtcctttgtcaagaccacggccttacaccggagcaagtcgtggccattgcatcccacgacggtggcaaacaggctcttgagacggttcagagacttctcccagttctctgtcaagcccacgggctgactcccgatcaagttgtagcgattgcgtcgaacattggagggaaacaagcattggagactgtccaacggctccttcccgtgttgtgtcaagcccacggtttgacgcctgcacaagtggtcgccatcgccagccatgatggcggtaagcaggcgctggaaacagtacagcgcctgctgcctgtactgtgccaggatcatggactgaccccagaccaggtagtcgcaatcgcgaacaataatgggggaaagcaagccctggaaaccgtgcaaaggttgttgccggtcctttgtcaagaccacggccttacaccggagcaagtcgtggccattgcaagcaacatcggtggcaaacaggctcttgagacggttcagagacttctcccagttctctgtcaagcccacgggctgacacccgaacaggtggtcgccattgctaataataacggaggacggccagccttggagtccatcgtagcccaattgtccaggcccgatcccgcgttggctgcgttaacgaatgaccatctggtggcgttggcatgtcttggtggacgacccgcgctcgatgcagtcaaaaagggtctgcctcatgctcccgcattgatcaaaagaaccaaccggcggattcccgagagaacttcccatcgagtcgcgggatccacgcgtttcttggacggtattgacaaagctcaggacgaacatgaaaagtaccactctaactggagagctatggcctccgattttaatcttccgccggtggtagcgaaagaaatcgttgccagttgcgacaaatgccaattgaagggagaagccatgcatggtcaagtggattgttcccccggaatatggcaactcgattgcacgcatctggaaggcaaggtcatcctcgtagcggtacatgttgcttctggatatattggcgccgaggttataccggcagaaacgggccaagaaacagcgtactttctcctgaaacttgcgggacgctggcctgtgaaaacgattcataccgacaacggttctaactttaccggagcaacagtacgggccgcatgctggtgggccggtataaagcaggaatttgggattccatacaatccgcaaagtcaaggtgtcgtcgagtctatgaataaggaactcaaaaagataattggtcaggttagagatcaagccgaacatctcaagacggcggtccaaatggcagtttttattcacaactttaagaggaaaggtgggattggtggctattcagcaggggagcgaatagtggacataatagcaaccgacatacagactaaggagttgcaaaagcagatcacaaagattcaaaatctcgagtaa

SEQ ID NO: 891 - DNA, 3402 bp, Artificial Sequence
  Chemically Synthesized
atgacgcgtttcttggacggtattgacaaagctcaggacgaacatgaaaagtaccactctaactggagagctatggcctccgattttaatcttccgccggtggtagcgaaagaaatcgttgccagttgcgacaaatgccaattgaagggagaagccatgcatggtcaagtggattgttcccccggaatatggcaactcgattgcacgcatctggaaggcaaggtcatcctcgtagcggtacatgttgcttctggatatattggcgccgaggttataccggcagaaacgggccaagaaacagcgtactttctcctgaaacttgcgggacgctggcctgtgaaaacgattcataccgacaacggttctaactttaccggagcaacagtacgggccgcatgctggtgggccggtataaagcaggaatttgggattccatacaatccgcaaagtcaaggtgtcgtcgagtctatgaataaggaactcaaaaagataattggtcaggttagagatcaagccgaacatctcaagacggcggtccaaatggcagtttttattcacaactttaagaggaaaggtgggattggtggctattcagcaggggagcgaatagtggacataatagcaaccgacatacagactaaggagttgcaaaagcagatcacaaagattcaaaatctcgaggggggcgggggaagcggcggtggaggtagtggagggggaggatcacccgggggaatcgattacaaggatgacgatgacaagatggcccccaagaagaagaggaaggtgggcattcaccgcggggtacctatggtggacttgaggacactcggttattcgcaacagcaacaggagaaaatcaagcctaaggtcaggagcaccgtcgcgcaacaccacgaggcgcttgtggggcatggcttcactcatgcgcatattgtcgcgctttcacagcaccctgcggcgcttgggacggtggctgtcaaataccaagatatgattgcggccctgcccgaagccacgcacgaggcaattgtaggggtcggtaaacagtggtcgggagcgcgagcacttgaggcgctgctgactgtggcgggtgagcttagggggcctccgctccagctcgacaccgggcagctgctgaagatcgcgaagagagggggagtaacagcggtagaggcagtgcacgcctggcgcaatgcgctcaccggggcccccttgaacctgaccccagaccaggtagtcgcaatcgcgaacaataatgggggaaagcaagccctggaaaccgtgcaaaggttgttgccggtcctttgtcaagaccacggccttacaccggagcaagtcgtggccattgcaagcaatgggggtggcaaacaggctcttgagacggttcagagacttctcccagttctctgtcaagcccacgggctgactcccgatcaagttgtagcgattgcgaataacaatggagggaaacaagcattggagactgtccaacggctccttcccgtgttgtgtcaagcccacggtttgacgcctgcacaagtggtcgccatcgccaacaacaacggcggtaagcaggcgctggaaacagtacagcgcctgctgcctgtactgtgccaggatcatggactgaccccagaccaggtagtcgcaatcgcgtcaaacggagggggaaagcaagccctggaaaccgtgcaaaggttgttgccggtcctttgtcaagaccacggccttacaccggagcaagtcgtggccattgcatcccacgacggtggcaaacaggctcttgagacggttcagagacttctcccagttctctgtcaagcccacgggctgactcccgatcaagttgtagcgattgcgaataacaatggagggaaacaagcattggagactgtccaacggctccttcccgtgttgtgtcaagcccacggtttgacgcctgcacaagtggtcgccatcgccaacaacaacggcggtaagcaggcgctggaaacagtacagcgcctgctgcctgtactgtgccaggatcatggactgaccccagaccaggtagtcgcaatcgcgaacaataatgggggaaagcaagccctggaaaccgtgcaaaggttgttgccggtcctttgtcaagaccacggccttacaccggagcaagtcgtggccattgcaaataataacggtggcaaacaggctcttgagacggttcagagacttctcccagttctctgtcaagcccacgggctgactcccgatcaagttgtagcgattgcgtccaacggtggagggaaacaagcattggagactgtccaacggctccttcccgtgttgtgtcaagcccacggtttgacgcctgcacaagtggtcgccatcgcctccaatattggcggtaagcaggcgctggaaacagtacagcgcctgctgcctgtactgtgccaggatcatggactgaccccagaccaggtagtcgcaatcgcgaacaataatgggggaaagcaagccctggaaaccgtgcaaaggttgttgccggtcctttgtcaagaccacggccttacaccggagcaagtcgtggccattgcatcccacgacggtggcaaacaggctcttgagacggttcagagacttctcccagttctctgtcaagcccacgggctgactcccgatcaagttgtagcgattgcgaataacaatggagggaaacaagcattggagactgtccaacggctccttcccgtgttgtgtcaagcccacggtttgacgcctgcacaagtggtcgccatcgccaacaacaacggcggtaagcaggcgctggaaacagtacagcgcctgctgcctgtactgtgccaggatcatggactgaccccagaccaggtagtcgcaatcgcgtcacatgacgggggaaagcaagccctggaaaccgtgcaaaggttgttgccggtcctttgtcaagaccacggcctgacacccgaacaggtggtcgccattgcttctaatgggggaggacggccagccttggagtccatcgtagcccaattgtccaggcccgatcccgcgttggctgcgttaacgaatgaccatctggtggcgttggcatgtcttggtggacgacccgcgctcgatgcagtcaaaaagggtctgcctcatgctcccgcattgatcaaaagaaccaaccggcggattcccgagagaacttcccatcgagtcgcgggatccaactcaaagaaaaggtcactggaggacaacgaaacggaaatcaaagtctccagagacacctggaacactaagaacatgcggtccctggaaccgccacgaagcaagaaacggatacatggcggagactacaaagaccatgacggtgattataaagatcatgacatcgactacaaggatgacgatgacaagtaa

SEQ ID NO: 892 - DNA, 3504 bp, Artificial Sequence
  Chemically Synthesized
atgacgcgtttcttggacggtattgacaaagctcaggacgaacatgaaaagtaccactctaactggagagctatggcctccgattttaatcttccgccggtggtagcgaaagaaatcgttgccagttgcgacaaatgccaattgaagggagaagccatgcatggtcaagtggattgttcccccggaatatggcaactcgattgcacgcatctggaaggcaaggtcatcctcgtagcggtacatgttgcttctggatatattggcgccgaggttataccggcagaaacgggccaagaaacagcgtactttctcctgaaacttgcgggacgctggcctgtgaaaacgattcataccgacaacggttctaactttaccggagcaacagtacgggccgcatgctggtgggccggtataaagcaggaatttgggattccatacaatccgcaaagtcaaggtgtcgtcgagtctatgaataaggaactcaaaaagataattggtcaggttagagatcaagccgaacatctcaagacggcggtccaaatggcagtttttattcacaactttaagaggaaaggtgggattggtggctattcagcaggggagcgaatagtggacataatagcaaccgacatacagactaaggagttgcaaaagcagatcacaaagattcaaaatctcgaggggggcgggggaagcggcggtggaggtagtggagggggaggatcacccgggggaatcgattacaaggatgacgatgacaagatggcccccaagaagaagaggaaggtgggcattcaccgcggggtacctatggtggacttgaggacactcggttattcgcaacagcaacaggagaaaatcaagcctaaggtcaggagcaccgtcgcgcaacaccacgaggcgcttgtggggcatggcttcactcatgcgcatattgtcgcgctttcacagcaccctgcggcgcttgggacggtggctgtcaaataccaagatatgattgcggccctgcccgaagccacgcacgaggcaattgtaggggtcggtaaacagtggtcgggagcgcgagcacttgaggcgctgctgactgtggcgggtgagcttagggggcctccgctccagctcgacaccgggcagctgctgaagatcgcgaacagagggggagtaacagcggtagaggcagtgcacgcctggcgcaatgcgctcaccggggcccccttgaacctgaccccagaccaggtagtcgcaatcgcgtcaaacggagggggaaagcaagccctggaaaccgtgcaaaggttgttgccggtcctttgtcaagaccacggccttacaccggagcaagtcgtggccattgcatcccacgacggtggcaaacaggctcttgagacggttcagagacttctcccagttctctgtcaagcccacgggctgactcccgatcaagttgtagcgattgcgtcgaacattggagggaaacaagcattggagactgtccaacggctccttcccgtgttgtgtcaagcccacggtttgacgcctgcacaagtggtcgccatcgcctccaatattggcggtaagcaggcgctggaaacagtacagcgcctgctgcctgtactgtgccaggatcatggactgaccccagaccaggtagtcgcaatcgcgaacaataatgggggaaagcaagccctggaaaccgtgcaaaggttgttgccggtcctttgtcaagaccacggccttacaccggagcaagtcgtggccattgcaagcaatgggggtggcaaacaggctcttgagacggttcagagacttctcccagttctctgtcaagcccacgggctgactcccgatcaagttgtagcgattgcgtcgcatgacggagggaaacaagcattggagactgtccaacggctccttcccgtgttgtgtcaagcccacggtttgacgcctgcacaagtggtcgccatcgccagccatgatggcggtaagcaggcgctggaaacagtacagcgcctgctgcctgtactgtgccaggatcatggactgaccccagaccaggtagtcgcaatcgcgaacaataatgggggaaagcaagccctggaaaccgtgcaaaggttgttgccggtcctttgtcaagaccacggccttacaccggagcaagtcgtggccattgcatcccacgacggtggcaaacaggctcttgagacggttcagagacttctcccagttctctgtcaagcccacgggctgactcccgatcaagttgtagcgattgcgtcgcatgacggagggaaacaagcattggagactgtccaacggctccttcccgtgttgtgtcaagcccacggtttgacgcctgcacaagtggtcgccatcgcctccaatattggcggtaagcaggcgctggaaacagtacagcgcctgctgcctgtactgtgccaggatcatggactgaccccagaccaggtagtcgcaatcgcgtcaaacggagggggaaagcaagccctggaaaccgtgcaaaggttgttgccggtcctttgtcaagaccacggccttacaccggagcaagtcgtggccattgcaaataataacggtggcaaacaggctcttgagacggttcagagacttctcccagttctctgtcaagcccacgggctgactcccgatcaagttgtagcgattgcgtcgcatgacggagggaaacaagcattggagactgtccaacggctccttcccgtgttgtgtcaagcccacggtttgacgcctgcacaagtggtcgccatcgccagccatgatggcggtaagcaggcgctggaaacagtacagcgcctgctgcctgtactgtgccaggatcatggactgaccccagaccaggtagtcgcaatcgcgtcacatgacgggggaaagcaagccctggaaaccgtgcaaaggttgttgccggtcctttgtcaagaccacggccttacaccggagcaagtcgtggccattgcaaataataacggtggcaaacaggctcttgagacggttcagagacttctcccagttctctgtcaagcccacgggctgacacccgaacaggtggtcgccattgcttctaacatcggaggacggccagccttggagtccatcgtagcccaattgtccaggcccgatcccgcgttggctgcgttaacgaatgaccatctggtggcgttggcatgtcttggtggacgacccgcgctcgatgcagtcaaaaagggtctgcctcatgctcccgcattgatcaaaagaaccaaccggcggattcccgagagaacttcccatcgagtcgcgggatccaactcaaagaaaaggtcactggaggacaacgaaacggaaatcaaagtctccagagacacctggaacactaagaacatgcggtccctggaaccgccacgaagcaagaaacggatacatggcggagactacaaagaccatgacggtgattataaagatcatgacatcgactacaaggatgacgatgacaagtaa

SEQ ID NO: 893 - DNA, 3504 bp, Artificial Sequence
  Chemically Synthesized
atgacgcgtttcttggacggtattgacaaagctcaggacgaacatgaaaagtaccactctaactggagagctatggcctccgattttaatcttccgccggtggtagcgaaagaaatcgttgccagttgcgacaaatgccaattgaagggagaagccatgcatggtcaagtggattgttcccccggaatatggcaactcgattgcacgcatctggaaggcaaggtcatcctcgtagcggtacatgttgcttctggatatattggcgccgaggttataccggcagaaacgggccaagaaacagcgtactttctcctgaaacttgcgggacgctggcctgtgaaaacgattcataccgacaacggttctaactttaccggagcaacagtacgggccgcatgctggtgggccggtataaagcaggaatttgggattccatacaatccgcaaagtcaaggtgtcgtcgagtctatgaataaggaactcaaaaagataattggtcaggttagagatcaagccgaacatctcaagacggcggtccaaatggcagtttttattcacaactttaagaggaaaggtgggattggtggctattcagcaggggagcgaatagtggacataatagcaaccgacatacagactaaggagttgcaaaagcagatcacaaagattcaaaatctcgaggggggcgggggaagcggcggtggaggtagtggagggggaggatcacccgggggaatcgattacaaggatgacgatgacaagatggcccccaagaagaagaggaaggtgggcattcaccgcggggtacctatggtggacttgaggacactcggttattcgcaacagcaacaggagaaaatcaagcctaaggtcaggagcaccgtcgcgcaacaccacgaggcgcttgtggggcatggcttcactcatgcgcatattgtcgcgctttcacagcaccctgcggcgcttgggacggtggctgtcaaataccaagatatgattgcggccctgcccgaagccacgcacgaggcaattgtaggggtcggtaaacagtggtcgggagcgcgagcacttgaggcgctgctgactgtggcgggtgagcttagggggcctccgctccagctcgacaccgggcagctgctgaagatcgcgaagagagggggagtaacagcggtagaggcagtgcacgcctggcgcaatgcgctcaccggggcccccttgaacctgaccccagaccaggtagtcgcaatcgcgtcacatgacgggggaaagcaagccctggaaaccgtgcaaaggttgttgccggtcctttgtcaagaccacggccttacaccggagcaagtcgtggccattgcatcccacgacggtggcaaacaggctcttgagacggttcagagacttctcccagttctctgtcaagcccacgggctgactcccgatcaagttgtagcgattgcgtccaacggtggagggaaacaagcattggagactgtccaacggctccttcccgtgttgtgtcaagcccacggtttgacgcctgcacaagtggtcgccatcgcctcgaatggcggcggtaagcaggcgctggaaacagtacagcgcctgctgcctgtactgtgccaggatcatggactgaccccagaccaggtagtcgcaatcgcgaacaataatgggggaaagcaagccctggaaaccgtgcaaaggttgttgccggtcctttgtcaagaccacggccttacaccggagcaagtcgtggccattgcaagcaacatcggtggcaaacaggctcttgagacggttcagagacttctcccagttctctgtcaagcccacgggctgactcccgatcaagttgtagcgattgcgtcgaacattggagggaaacaagcattggagactgtccaacggctccttcccgtgttgtgtcaagcccacggtttgacgcctgcacaagtggtcgccatcgccaacaacaacggcggtaagcaggcgctggaaacagtacagcgcctgctgcctgtactgtgccaggatcatggactgaccccagaccaggtagtcgcaatcgcgtcgaacattgggggaaagcaagccctggaaaccgtgcaaaggttgttgccggtcctttgtcaagaccacggccttacaccggagcaagtcgtggccattgcaagcaacatcggtggcaaacaggctcttgagacggttcagagacttctcccagttctctgtcaagcccacgggctgactcccgatcaagttgtagcgattgcgaataacaatggagggaaacaagcattggagactgtccaacggctccttcccgtgttgtgtcaagcccacggtttgacgcctgcacaagtggtcgccatcgcctccaatattggcggtaagcaggcgctggaaacagtacagcgcctgctgcctgtactgtgccaggatcatggactgaccccagaccaggtagtcgcaatcgcgtcaaacggagggggaaagcaagccctggaaaccgtgcaaaggttgttgccggtcctttgtcaagaccacggccttacaccggagcaagtcgtggccattgcaaataataacggtggcaaacaggctcttgagacggttcagagacttctcccagttctctgtcaagcccacgggctgactcccgatcaagttgtagcgattgcgaataacaatggagggaaacaagcattggagactgtccaacggctccttcccgtgttgtgtcaagcccacggtttgacgcctgcacaagtggtcgccatcgcctcgaatggcggcggtaagcaggcgctggaaacagtacagcgcctgctgcctgtactgtgccaggatcatggactgaccccagaccaggtagtcgcaatcgcgaacaataatgggggaaagcaagccctggaaaccgtgcaaaggttgttgccggtcctttgtcaagaccacggccttacaccggagcaagtcgtggccattgcatcccacgacggtggcaaacaggctcttgagacggttcagagacttctcccagttctctgtcaagcccacgggctgacacccgaacaggtggtcgccattgctaataataacggaggacggccagccttggagtccatcgtagcccaattgtccaggcccgatcccgcgttggctgcgttaacgaatgaccatctggtggcgttggcatgtcttggtggacgacccgcgctcgatgcagtcaaaaagggtctgcctcatgctcccgcattgatcaaaagaaccaaccggcggattcccgagagaacttcccatcgagtcgcgggatccaactcaaagaaaaggtcactggaggacaacgaaacggaaatcaaagtctccagagacacctggaacactaagaacatgcggtccctggaaccgccacgaagcaagaaacggatacatggcggagactacaaagaccatgacggtgattataaagatcatgacatcgactacaaggatgacgatgacaagtaa

SEQ ID NO: 894 - DNA, 3606 bp, Artificial Sequence
  Chemically Synthesized
atgacgcgtttcttggacggtattgacaaagctcaggacgaacatgaaaagtaccactctaactggagagctatggcctccgattttaatcttccgccggtggtagcgaaagaaatcgttgccagttgcgacaaatgccaattgaagggagaagccatgcatggtcaagtggattgttcccccggaatatggcaactcgattgcacgcatctggaaggcaaggtcatcctcgtagcggtacatgttgcttctggatatattggcgccgaggttataccggcagaaacgggccaagaaacagcgtactttctcctgaaacttgcgggacgctggcctgtgaaaacgattcataccgacaacggttctaactttaccggagcaacagtacgggccgcatgctggtgggccggtataaagcaggaatttgggattccatacaatccgcaaagtcaaggtgtcgtcgagtctatgaataaggaactcaaaaagataattggtcaggttagagatcaagccgaacatctcaagacggcggtccaaatggcagtttttattcacaactttaagaggaaaggtgggattggtggctattcagcaggggagcgaatagtggacataatagcaaccgacatacagactaaggagttgcaaaagcagatcacaaagattcaaaatctcgaggggggcgggggaagcggcggtggaggtagtggagggggaggatcacccgggggaatcgattacaaggatgacgatgacaagatggcccccaagaagaagaggaaggtgggcattcaccgcggggtacctatggtggacttgaggacactcggttattcgcaacagcaacaggagaaaatcaagcctaaggtcaggagcaccgtcgcgcaacaccacgaggcgcttgtggggcatggcttcactcatgcgcatattgtcgcgctttcacagcaccctgcggcgcttgggacggtggctgtcaaataccaagatatgattgcggccctgcccgaagccacgcacgaggcaattgtaggggtcggtaaacagtggtcgggagcgcgagcacttgaggcgctgctgactgtggcgggtgagcttagggggcctccgctccagctcgacaccgggcagctgctgaagatcgcgaagagagggggagtaacagcggtagaggcagtgcacgcctggcgcaatgcgctcaccggggcccccttgaacctgaccccagaccaggtagtcgcaatcgcgaacaataatgggggaaagcaagccctggaaaccgtgcaaaggttgttgccggtcctttgtcaagaccacggccttacaccggagcaagtcgtggccattgcaagcaacatcggtggcaaacaggctcttgagacggttcagagacttctcccagttctctgtcaagcccacgggctgactcccgatcaagttgtagcgattgcgtcgaacattggagggaaacaagcattggagactgtccaacggctccttcccgtgttgtgtcaagcccacggtttgacgcctgcacaagtggtcgccatcgccaacaacaacggcggtaagcaggcgctggaaacagtacagcgcctgctgcctgtactgtgccaggatcatggactgaccccagaccaggtagtcgcaatcgcgtcaaacggagggggaaagcaagccctggaaaccgtgcaaaggttgttgccggtcctttgtcaagaccacggccttacaccggagcaagtcgtggccattgcaagcaatgggggtggcaaacaggctcttgagacggttcagagacttctcccagttctctgtcaagcccacgggctgactcccgatcaagttgtagcgattgcgtcgcatgacggagggaaacaagcattggagactgtccaacggctccttcccgtgttgtgtcaagcccacggtttgacgcctgcacaagtggtcgccatcgccaacaacaacggcggtaagcaggcgctggaaacagtacagcgcctgctgcctgtactgtgccaggatcatggactgaccccagaccaggtagtcgcaatcgcgtcgaacattgggggaaagcaagccctggaaaccgtgcaaaggttgttgccggtcctttgtcaagaccacggccttacaccggagcaagtcgtggccattgcaaataataacggtggcaaacaggctcttgagacggttcagagacttctcccagttctctgtcaagcccacgggctgactcccgatcaagttgtagcgattgcgaataacaatggagggaaacaagcattggagactgtccaacggctccttcccgtgttgtgtcaagcccacggtttgacgcctgcacaagtggtcgccatcgccaacaacaacggcggtaagcaggcgctggaaacagtacagcgcctgctgcctgtactgtgccaggatcatggactgaccccagaccaggtagtcgcaatcgcgtcacatgacgggggaaagcaagccctggaaaccgtgcaaaggttgttgccggtcctttgtcaagaccacggccttacaccggagcaagtcgtggccattgcaaataataacggtggcaaacaggctcttgagacggttcagagacttctcccagttctctgtcaagcccacgggctgactcccgatcaagttgtagcgattgcgtcgaacattggagggaaacaagcattggagactgtccaacggctccttcccgtgttgtgtcaagcccacggtttgacgcctgcacaagtggtcgccatcgccagccatgatggcggtaagcaggcgctggaaacagtacagcgcctgctgcctgtactgtgccaggatcatggactgaccccagaccaggtagtcgcaatcgcgtcgaacattgggggaaagcaagccctggaaaccgtgcaaaggttgttgccggtcctttgtcaagaccacggccttacaccggagcaagtcgtggccattgcatcccacgacggtggcaaacaggctcttgagacggttcagagacttctcccagttctctgtcaagcccacgggctgactcccgatcaagttgtagcgattgcgtcgcatgacggagggaaacaagcattggagactgtccaacggctccttcccgtgttgtgtcaagcccacggtctgacacccgaacaggtggtcgccattgcttcccacgacggaggacggccagccttggagtccatcgtagcccaattgtccaggcccgatcccgcgttggctgcgttaacgaatgaccatctggtggcgttggcatgtcttggtggacgacccgcgctcgatgcagtcaaaaagggtctgcctcatgctcccgcattgatcaaaagaaccaaccggcggattcccgagagaacttcccatcgagtcgcgggatccaactcaaagaaaaggtcactggaggacaacgaaacggaaatcaaagtctccagagacacctggaacactaagaacatgcggtccctggaaccgccacgaagcaagaaacggatacatggcggagactacaaagaccatgacggtgattataaagatcatgacatcgactacaaggatgacgatgacaagtaa

SEQ ID NO: 895 - DNA, 807 bp, Artificial Sequence; identical to SEQ ID NO: 239
  Chemically Synthesized

1-31. (canceled)

32. A fusion protein comprising an editing protein and a nuclear localization signal (NLS) selected from the group consisting of a Ty1 NLS, a Ty1-like NLS, and a Ty2 NLS.

33. The fusion protein of claim 32, wherein the NLS comprises a sequence at least 85% identical to a sequence selected from the group consisting of SEQ ID NOs: 51, 254-257, and 275-887.

34. The fusion protein of claim 32, wherein the NLS is a Ty1 NLS.

35. The fusion protein of claim 34, wherein the NLS comprises a sequence at least 85% identical to SEQ ID NO:51.

36. The fusion protein of claim 35, wherein the NLS comprises SEQ ID NO: 51.

37. The fusion protein of claim 32, wherein the editing protein is a CRISPR-associated (Cas) protein.

38. The fusion protein of claim 37, wherein the Cas protein is selected from the group consisting of Cas9 and Cpf1.

39. The fusion protein of claim 38, wherein the Cas protein comprises a sequence at least 85% identical a sequence selected from the group consisting of SEQ ID NOs:41, 43 and 45.

40. The fusion protein of claim 32, wherein the fusion protein comprises a sequence at least 85% identical to SEQ ID NO: 250.

41. The fusion protein of claim 32, wherein the fusion protein comprises the amino acid sequence of SEQ ID NO: 51 and the amino acid sequence of SEQ ID NO: 41.

42. A nucleic acid molecule encoding a fusion protein comprising an editing protein and a nuclear localization signal (NLS), wherein the NLS is selected from the group consisting of a Ty1 NLS, a Ty1-like NLS, and a Ty2 NLS.

43. The nucleic acid molecule of claim 42, wherein the NLS comprises an amino acid sequence at least 85% identical to a sequence selected from the group consisting of SEQ ID NOs: 51, 254-257, and 275-887.

44. The nucleic acid molecule of claim 42, wherein the editing protein is a CRISPR-associated (Cas) protein.

45. The nucleic acid molecule of claim 44, wherein the Cas protein is selected from the group consisting of Cas9 and Cpf1.

46. The nucleic acid molecule of claim 44, wherein the Cas protein comprises an amino acid sequence at least 85% identical a sequence selected from the group consisting of SEQ ID NOs: 41, 43 and 45.

47. The nucleic acid molecule of claim 46, wherein the nucleic acid molecule comprises a nucleic acid sequence at least 85% identical to SEQ ID NO: 139, 141, and 143.

48. The nucleic acid molecule of claim 42, wherein the fusion protein comprises an amino acid sequence at least 85% identical to SEQ ID NO: 250.

49. The nucleic acid molecule of claim 42, wherein the fusion protein comprises the amino acid sequence of SEQ ID NO: 51 and the amino acid sequence of SEQ ID NO: 41.

50. The nucleic acid molecule of claim 42, wherein the nucleic acid molecule comprises the nucleic acid sequence of SEQ ID NO: 139 and the nucleic acid sequence of SEQ ID NO: 149.

51. The nucleic acid molecule of claim 48, wherein the nucleic acid molecule comprises a sequence at least 85% identical to SEQ ID NO:259.
